(19) United States
(12) Patent Application Publication
(10) Pub. No.: US 2023/0332164 A1
(43) Pub. Date: Oct. 19, 2023

(54) BACTERIA ENGINEERED TO SECRETE ACTIVE PROTEINS

(71) Applicant: Synlogic Operating Company, Inc., Cambridge, MA (US)

(72) Inventors: Dean Falb, Sherborn, MA (US); Vincent M. Isabella, Medford, MA (US); Paul F. Miller, Salem, CT (US); Adam B. Fisher, Cambridge, MA (US); Ning Li, Winchester, MA (US); Jose M. Lora, Boston, MA (US)

(21) Appl. No.: 18/028,785

(22) PCT Filed: Sep. 30, 2021
(86) PCT No.: PCT/US2021/052882

§ 371 Date: Mar. 28, 2023

Related U.S. Application Data
(60) Provisional application No. 63/164,815, filed on Mar. 23, 2021.
(60) Provisional application No. 63/085,363, filed on Sep. 30, 2020.

(51) Int. Cl. C12N 15/70; C07K 14/54

(52) U.S. Cl. CPC C12N 15/70; C07K 14/54; C12R 2001/19

(57) ABSTRACT

Recombinant bacteria capable of producing effector molecules, which are secreted as therapeutically active polypeptides, pharmaceutical compositions thereof, and methods of treating or preventing autoimmune disorders, cancer and/or metabolic diseases, are disclosed.

### RELATED APPLICATIONS

[0001] The instant application claims priority to U.S. Provisional Application No. 63/164,815 filed Mar. 23, 2021 and U.S. Provisional Application No. 63/085,363 filed Sep. 30, 2020, the entire contents of each of which are expressly incorporated by reference herein in their entireties.

### SEQUENCE LISTING

[0002] The instant application contains a Sequence Listing which has been submitted electronically in ASCII format and is hereby incorporated by reference in its entirety. Said ASCII copy, created on Sep. 28, 2021, is named 126046-03020_SL.txt and is 1,086,656 bytes in size.

### BACKGROUND

[0003] A growing body of scientific evidence suggests that probiotic bacteria are beneficial in the treatment or prevention of various diseases or disorders associated with the gut, including, for example, gastrointestinal disorders such as Crohn's disease and inflammatory bowel syndrome. More recently, recombinant bacteria have emerged as a potential new therapeutic treatment modality for gastrointestinal diseases and have also opened the field of bacterial therapies to a large number of other indications, including metabolic diseases, inflammatory diseases, and cancer. One benefit of recombinant bacteria is the ability to specifically target one or more disease mechanisms. For example, for gastrointestinal disorders, bacteria can be engineered to contain genes for the expression of anti-inflammatory agents or agents that aid in the healing of a disrupted gut-barrier, such as the short chain fatty acid butyrate, e.g., as described in International Patent Publication WO2016141108.

[0004] Additionally, bacterial therapies have the additional advantage that the size of the bacterial chromosome(s) allows for the insertion of gene(s) for the production and secretion of multiple effectors. Potential secreted polypeptides include signaling molecules, such as cytokines and growth factors, their receptors, and single chain antibodies directed against cell surface molecules, many of which have been proposed as are promising candidates for therapeutic interference in a wide range of indications.

[0005] A certain level of technical understanding of approaches to the secretion of heterologous proteins from bacteria can be gained from recombinant production strategies for therapeutic or other proteins. However, effective protocols for generation of recombinant bacteria which produce and secrete biologically active polypeptides in vivo have yet to be established.

[0006] Multiple conditions must be met for the successful secretion of effective amounts of biologically active polypeptides. In Gram-negative bacteria, secreted polypeptides have to cross the two membranes and a thin layer of peptidoglycan in the periplasmic space between the inner and outer lipid membranes. Type I, II, III, IV, and V secretion pathways are common among Gram-negative bacteria, and all of these pathways have been exploited for the secretion of recombinant proteins. However, given that secretion of a polypeptide across the inner and outer membranes of a gram-negative bacterium is complex, involving the execution of several steps and the use of different biological factors, a number of complications can arise. For example, problems include incomplete translocation across the inner membrane, insufficient capacity of the export machinery, and proteolytic degradation (Mergulhao et al., Biotechnology Advances 23 (2005) 177-202). In addition, the ability of a polypeptide to be secreted from a Gram-negative bacteria, such as E. coli, depends on the specific polypeptide to be secreted and the biochemical properties thereof, such as formation of correct disulfide bonds, size of protein or levels of expression.

[0007] Given the number of factors involved in secreting polypeptides from Gram-negative bacteria, in combination with factors arising from the different biological properties and characteristics of individual polypeptides, e.g., size, dimer formation, secondary and tertiary protein folding, and polypeptide expression levels, secretion of polypeptides from Gram-negative bacteria remains challenging. Further, even if successful secretion is achieved, the polypeptide is not always secreted in a biologically active form.

[0008] In view of the difficulties outlined here as well as others, there remains a need for engineering and methods for the successful secretion of biologically active polypeptides.

### SUMMARY

[0009] The instant disclosure relates to compositions of recombinant bacteria and methods for secreting therapeutically active proteins from recombinant bacteria for treatment of diseases or disorders. The recombinant bacteria disclosed herein are capable of high yield production of functionally active effector molecules, which are secreted as therapeutically active polypeptides.

[0010] In some embodiments, the recombinant bacteria are functionally silent until they reach an inducing environment, e.g., a mammalian gut, or the tumor microenvironment wherein expression of the therapeutic molecule is induced. In certain embodiments, the recombinant bacteria are naturally non-pathogenic and may be introduced into the gut in order to reduce gut inflammation and/or enhance gut barrier function and may thereby further ameliorate or prevent an autoimmune disorder. In some embodiments, the recombinant bacteria are tumor targeting and may be introduced into the tumor to stimulate the immune system, combat immune suppression or otherwise fight the cancer. In certain embodiments, the secreted effector molecule is stably produced by the recombinant bacteria, and/or the recombinant bacteria are stably maintained in vivo and/or in vitro. The disclosure also provides pharmaceutical compositions comprising the recombinant bacteria. Methods of treating diseases are also provided.

[0011] In some embodiments, the recombinant bacteria produce one or more therapeutic molecule(s) under the control of one or more promoters induced by an environmental condition, e.g., an environmental condition found in the mammalian gut, such as an inflammatory condition or a low oxygen condition. In some embodiments, the recombinant bacteria produce one or more therapeutic molecule(s) under the control of one or more promoters induced the tumor microenvironment. In non-limiting exemplary embodiments, the recombinant bacteria produce one or more therapeutic molecule(s) under the control of an oxygen level-dependent promoter, a reactive oxygen species (ROS)-dependent promoter, or a reactive nitrogen species (RNS)-dependent promoter, and a corresponding transcription factor.

[0012] In some embodiments, the recombinant bacterium comprises a gene sequence encoding one or more effector polypeptides and one or more secretion tags, wherein the gene sequence is operably linked to a directly or indirectly inducible promoter that is not associated with the gene sequence in nature and wherein the encoded effector polypeptide is secreted in a biologically active form, and comprising one or more mutations or deletions in an outer membrane protein selected from a group consisting of lpp, nlP, tolA, and PAL.

[0013] In some embodiments, the recombinant bacterium comprise one or more one gene(s) encoding one or more effector polypeptides for secretion of an active polypeptide in vivo, wherein the one or more gene sequence(s) for producing the effector polypeptide is operably linked to a directly or indirectly inducible promoter that is not associated with the gene(s) in nature. In some embodiments, the secretion tags are N terminally or C terminally fused to the effector polypeptides. For example, the secretion tag may be covalently linked to the N terminus of the polypeptide through a peptide bond or polypeptide linker. Alternatively, the secretion tag may be covalently linked to the C terminus of the polypeptide through a peptide bond or polypeptide linker.

[0014] In some embodiments, the effector is selected from a group consisting of GLP-2, IL-22, IL-10, IL-27, IL-19, IL-20, IL-24, IL-15, IL-2, GMCSF, TNF-alpha, IFN-gamma, CXCL10, CXCL9 and hyaluronidase. In some embodiments, the effector include hIL-12a (SEQ ID NO: 1131), hIL-1213 (SEQ ID NO: 1132); mIL-12 (SEQ ID NO: 1131); mIL-1213 (SEQ ID NO: 1133); hIL-15 (SEQ ID NO: 1134); GMCSF (SEQ ID NO: 1135); TNF-alpha (extracellular portion) (SEQ ID NO: 1136); IFN-gamma (SEQ ID NO: 1137); CXCL10 (SEQ ID NO: 1138); and CXCL9 (SEQ ID NO: 1139). In some embodiments, recombinant bacteria comprise a nucleic acid sequence that encodes a polypeptide which is at least about 80%, 85%, 90%, 95%, or 99% homologous to the DNA sequence of any one of SEQ ID NOs: 1131-1139. In some embodiments, the gene encoding the effector include hIL-12a (SEQ ID NO: 1140), hIL-1213 (SEQ ID NO: 1141); mIL-12 (SEQ ID NO: 1142); mIL-1213 (SEQ ID NO: 1143); hIL-15 (SEQ ID NO: 1144); GMCSF (SEQ ID NO: 1145); TNF-alpha (extracellular portion) (SEQ ID NO: 1146); IFN-gamma (SEQ ID NO: 1147); and CXCL10 (SEQ ID NO: 1148). In some embodiments, recombinant bacteria comprise a nucleic acid sequence that is at least about 80%, 85%, 90%, 95%, or 99% homologous to the DNA sequence of any one of SEQ ID NOs: 1140-1148.

[0015] Non-limiting examples of contemplated secretion tags include PhoA, OmpF, ompA, cvaC, TorA, fdnG, dmsA, PelB, tolB, torT, dsbA, GltI, GspD, HdeB, MalE, mglB, OppA, PpiA, lamb, ECOLIN_05715, ECOLIN_16495, ECOLIN_19410, and ECOLIN_19880 secretion signals. In some embodiments, the secretion tag is cleaved after secretion into the extracellular environment. In some embodiments, the secretion tag is PhoA. In some embodiments, the secretion tag is ECOLIN 19410 secretion tag. In some embodiments, the secretion tag is GspD secretion tag. In some embodiments, the secretion tag is HdeB secretion tag. In some embodiments, the secretion tag is torT secretion tag. In some embodiments, the secretion tags and/or FliC components are selected from the group consisting of fliC-FliC20 (SEQ ID NO: 894); flic-RBS (SEQ ID NO: 895-897); RBS-phoA (SEQ ID NO: 898); phoA (SEQ ID NO: 889); RBS-ompF (SEQ ID NO: 900); ompF (SEQ ID NO: 901); RBS-cvaC (SEQ ID NO: 902); cvaC (SEQ ID NO: 903); RBS-phoA (Optimized) (SEQ ID NO: 904); optimized phoA (SEQ ID NO: 905); RBS-TorA (SEQ ID NO: 906); TorA (SEQ ID NO: 907); RBS-TorA alternate (SEQ ID NO: 908); TorA (alternate) (SEQ ID NO: 909); RBS-fdnG (SEQ ID NO: 910); fdnG (SEQ ID NO: 911); RBS-dmsA (SEQ ID NO: 912); dmsA (SEQ ID NO: 913) and PelB. In some embodiments, recombinant bacteria comprise a nucleic acid sequence that is at least about 80%, 85%, 90%, 95%, or 99% homologous to the DNA sequence of any one of SEQ ID NOs: 894-913.

[0016] In some embodiments, the recombinant bacteria further have one or more mutations or deletions in an outer membrane protein selected from lpp, nlP, tolA, and PAL. In some embodiments, the fully or partially deleted or mutated outer membrane protein is PAL. In some embodiments, the recombinant bacteria further encode a stabilizing polypeptide. In some embodiments, the effector polypeptide is covalently fused to the stabilizing polypeptide through a peptide linker or a peptide bond.

[0017] In some embodiments, the C terminus of the effector polypeptide is covalently fused to the N terminus of the stabilizing polypeptide through the peptide linker or peptide bond. In some embodiments, the N terminus of the effector polypeptide is covalently fused to the C terminus of the stabilizing polypeptide through the peptide linker or peptide bond. In some embodiments, the stabilizing polypeptide comprises an immunoglobulin Fc polypeptide. In some embodiments, the immunoglobulin Fc polypeptide comprises at least a portion of an immunoglobulin heavy chain CH2 constant region. In some embodiments, the immunoglobulin Fc polypeptide comprises at least a portion of an immunoglobulin heavy chain CH3 constant region. In some embodiments, the immunoglobulin Fc polypeptide comprises at least a portion of an immunoglobulin heavy chain CH1 constant region. In some embodiments, the immunoglobulin Fc polypeptide comprises at least a portion of an immunoglobulin variable hinge region. In some embodiments, the immunoglobulin Fc polypeptide comprises at least a portion of an immunoglobulin variable hinge region, immunoglobulin heavy chain CH2 constant region and an immunoglobulin heavy chain CH3 constant region. In some embodiments, the immunoglobulin Fc polypeptide is a human IgA or human IgG Fc polypeptide. In some embodiments, the immunoglobulin Fc polypeptide is a human IgG Fc polypeptide. In some embodiments, the immunoglobulin Fc polypeptide is a human IgA polypeptide. In some embodiments, the linker comprises a glycine rich peptide. In some embodiments, the glycine rich peptide comprises the sequence [GlyGlyGlyGlySer]n where n is 1, 2, 3, 4, 5 or 6 (SEQ ID NO: 1053). In some embodiments, the glycine rich peptide comprises the sequence GGGGSGGGGSGGGGSGGGGS (SEQ ID NO: 509). In some embodiments, the one or more effector polypeptides for secretion of an active polypeptide in vivo require multimerization for the effector polypeptide to be active in vivo. In some embodiments, the one or more effector polypeptides for secretion of an active polypeptide in vivo require dimerization for the effector polypeptide to be active in vivo. In some embodiments, the active polypeptide is a homodimer. In some embodiments, the active polypeptide is a heterodimer. In some embodiments, the gene sequence(s) encoding the more effector polypeptides encode a first monomer polypeptide and a second monomer polypeptide and wherein the first and second monomer polypeptides are covalently to each other through a peptide linker or a peptide bond. In some embodiments, the linker comprises GGGGSGGGS (SEQ ID NO: 1054). In some embodiments, the stabilizing polypeptide has the ability to perform an effector function. In some embodiments, the stabilizing polypeptide is able to perform an anti-inflammatory effector function. In some embodiments, the stabilizing polypeptide is able to perform an pro-inflammatory effector function. In some embodiments, the stabilizing polypeptide is a cytokine.

[0018] In some embodiments, the stabilizing polypeptide is a multimer. In some embodiments, the stabilizing polypeptide is a dimer. In some embodiments, the gene sequences encoding the stabilizing polypeptide comprise a monomer and a second monomer, wherein the first and second monomer are covalently linked to each other through a peptide bond or a peptide linker.

[0019] In some embodiments, the gene sequences are located on a chromosome in the bacterium. In some embodiments, the gene sequences are located on a plasmid in the bacterium. In some embodiments, the bacterium is a probiotic bacterium. In some embodiments, the bacterium is a tumor targeting bacterium. In some embodiments, the bacterium is selected from the group consisting of Bacteroides, Bifidobacterium, Clostridium, Escherichia, Lactobacillus, and Lactococcus. In some embodiments, the bacterium is selected from Clostridium novyi NT, and Clostridium butyricum, and Bifidobacterium longum. In some embodiments, the bacterium is Escherichia coli strain Nissle. In some embodiments, the bacterium is an auxotroph in a gene that is complemented when the bacterium is present in a mammalian gut, e.g., an auxotroph in diaminopimelic acid or an enzyme in the thymine biosynthetic pathway.

[0020] In some embodiments, the recombinant bacterium is capable of producing about 25 pg/1E9 cells/hr to about 4500 pg/1E9 cells/hr of IL-2 in vitro. In some embodiments, the bacterium is capable of producing at least 25 pg/1E9 cells/hr, at least 50 pg/1E9 cells/hr, at least 100 pg/1E9 cells/hr, at least 150 pg/1E9 cells/hr, at least 200 pg/1E9 cells/hr, at least 250 pg/1E9 cells/hr, at least 300 pg/1E9 cells/hr, at least 400 pg/1E9 cells/hr, at least 500 pg/1E9 cells/hr, at least 750 pg/1E9 cells/hr, at least 1000 pg/1E9 cells/hr, at least 1500 pg/1E9 cells/hr, at least 2000 pg/1E9 cells/hr, at least 2500 pg/1E9 cells/hr, at least 3000 pg/1E9 cells/hr, at least 3500 pg/1E9 cells/hr, at least 4000 pg/1E9 cells/hr, or at least 4500 pg/1E9 cells/hr of IL-2 in vitro. In some embodiments, the bacterium is capable of producing about 25 pg/1E9 cells/hr to about 4500 pg/1E9 cells/hr, about 500 pg/1E9 cells/hr to about 4500 pg/1E9 cells/hr, about 1000 pg/1E9 cells/hr to about 4500 pg/1E9 cells/hr, about 2000 pg/1E9 cells/hr to about 4500 pg/1E9 cells/hr, about 3000 to about 4500 pg/1E9 cells/hr, about 25 pg/1E9 cells/hr to about 3000 pg/1E9 cells/hr, about 500 pg/1E9 cells/hr to about 3000 pg/1E9 cells/hr, about 1000 pg/1E9 cells/hr to about 3000 pg/1E9 cells/hr about 2000 pg/1E9 cells/hr to about 3000 pg/1E9 cells/hr, about 25 pg/1E9 cells/hr to about 2000 pg/1E9 cells/hr, about 500 to about 2000 pg/1E9 cells/hr, about 1000 pg/1E9 cells/hr to about 2000 pg/1E9 cells/hr, or about 25 pg/1E9 cells/hr to about 1000 pg/1E9 cells/hr of IL-2 in vitro.

[0021] In some embodiments, the recombinant bacterium is capable of producing about 1.5 ng/1E9 cells/hr to about 3 ng/1E9 cells/hr of IL15 in vitro. In some embodiments, the bacterium is capable of producing at least 1 ng/1E9 cells/hr, at least 1.5 ng/1E9 cells/hr, at least 2 ng/1E9 cells/hr, at least 2.5 ng/1E9 cells/hr, at least 3 ng/1E9 cells/hr, at least 3.5 ng/1E9 cells/hr of IL15 in vitro. In some embodiments, the recombinant bacterium is capable of producing about 1 ng/1E9 cells/hr to about 3.5 ng/1E9 cells/hr, about 1.5 ng/1E9 cells/hr to about 3.5 ng/1E9 cells/hr, about 2 ng/1E9 cells/hr to about 3.5 ng/1E9 cells/hr, about 2.5 ng/1E9 cells/hr to about 3.5 ng/1E9 cells/hr, about 3 ng/1E9 cells/hr to about 3.5 ng/1E9 cells/hr, 1 ng/1E9 cells/hr to about 3 ng/1E9 cells/hr, about 1.5 ng/1E9 cells/hr to about 3 ng/1E9 cells/hr, about 2 ng/1E9 cells/hr to about 3 ng/1E9 cells/hr, about 2.5 ng/1E9 cells/hr to about 3 ng/1E9 cells/hr, 1 ng/1E9 cells/hr to about 2.5 ng/1E9 cells/hr, about 1.5 ng/1E9 cells/hr to about 2.5 ng/1E9 cells/hr, about 2 ng/1E9 cells/hr to about 2.5 ng/1E9 cells/hr, 1 ng/1E9 cells/hr to about 2 ng/1E9 cells/hr, about 1.5 ng/1E9 cells/hr to about 2 ng/1E9 cells/hr, or 1 ng/1E9 cells/hr to about 1.5 ng/1E9 cells/hr of IL15 in vitro.

[0022] In another aspect, the recombinant bacterium comprises 1) a gene sequence encoding IL-22 and one or more secretion tags, wherein the gene sequence is operably linked to an FNR-responsive promoter; 2) one or more mutations or deletions in an outer membrane protein PAL; and wherein IL-22 is secreted in a biologically active form. In some embodiments, the secretion tag is selected from a group consisting of PhoA, OmpF, ompA, cvaC, TorA, fdnG, dmsA, PelB, tolB, torT, dsbA, GltI, GspD, HdeB, MalE, mglB, OppA, PpiA, lamb, ECOLIN_05715, ECOLIN_16495, ECOLIN_19410, and ECOLIN_19880 secretion signals.

[0023] In some embodiments, the bacterium is capable of producing about 40 ng/1E8 cells/hr of IL-22 in vitro. In some embodiments, the bacterium is capable of producing about 5 ng/1E8 cells/hr to about 50 ng/1E8 cells/hr, about 10 ng/1E8 cells/hr to about 50 ng/1E8 cells/hr, about 15 ng/1E8 cells/hr to about 50 ng/1E8 cells/hr, about 20 ng/1E8 cells/hr to about 50 ng/1E8 cells/hr, about 25 ng/1E8 cells/hr to about 50 ng/1E8 cells/hr, about 30 ng/1E8 cells/hr to about 50 ng/1E8 cells/hr, about 35 ng/1E8 cells/hr to about 50 ng/1E8 cells/hr, about 40 ng/1E8 cells/hr to about 50 ng/1E8 cells/hr, about 45 ng/1E8 cells/hr to about 50 ng/1E8 cells/hr, 5 ng/1E8 cells/hr to about 45 ng/1E8 cells/hr, about 10 ng/1E8 cells/hr to about 45 ng/1E8 cells/hr, about 15 ng/1E8 cells/hr to about 45 ng/1E8 cells/hr, about 20 ng/1E8 cells/hr to about 45 ng/1E8 cells/hr, about 25 ng/1E8 cells/hr to about 45 ng/1E8 cells/hr, about 30 ng/1E8 cells/hr to about 45 ng/1E8 cells/hr, about 35 ng/1E8 cells/hr to about 50 ng/1E8 cells/hr, about 40 ng/1E8 cells/hr to about 45 ng/1E8 cells/hr, 5 ng/1E8 cells/hr to about 40 ng/1E8 cells/hr, about 10 ng/1E8 cells/hr to about 40 ng/1E8 cells/hr, about 15 ng/1E8 cells/hr to about 40 ng/1E8 cells/hr, about 20 ng/1E8 cells/hr to about 40 ng/1E8 cells/hr, about 25 ng/1E8 cells/hr to about 40 ng/1E8 cells/hr, about 30 ng/1E8 cells/hr to about 40 ng/1E8 cells/hr, about 35 ng/1E8 cells/hr to about 50 ng/1E8 cells/hr, 5 ng/1E8 cells/hr to about 35 ng/1E8 cells/hr, about 10 ng/1E8 cells/hr to about 35 ng/1E8 cells/hr, about 15 ng/1E8 cells/hr to about 35 ng/1E8 cells/hr, about 20 ng/1E8 cells/hr to about 35 ng/1E8 cells/hr, about 25 ng/1E8 cells/hr to about 35 ng/1E8 cells/hr, about 30 ng/1E8 cells/hr to about 35 ng/1E8 cells/hr, 5 ng/1E8 cells/hr to about 30 ng/1E8 cells/hr, about 10 ng/1E8 cells/hr to about 30 ng/1E8 cells/hr, about 15 ng/1E8 cells/hr to about 30 ng/1E8 cells/hr, about 20 ng/1E8 cells/hr to about 30 ng/1E8 cells/hr, about 25 ng/1E8 cells/hr to about 30 ng/1E8 cells/hr, 5 ng/1E8 cells/hr to about 25 ng/1E8 cells/hr, about 10 ng/1E8 cells/hr to about 25 ng/1E8 cells/hr, about 15 ng/1E8 cells/hr to about 25 ng/1E8 cells/hr, about 20 ng/1E8 cells/hr to about 25 ng/1E8 cells/hr, 5 ng/1E8 cells/hr to about 20 ng/1E8 cells/hr, about 10 ng/1E8 cells/hr to about 20 ng/1E8 cells/hr, about 15 ng/1E8 cells/hr to about 20 ng/1E8 cells/hr, 5 ng/1E8 cells/hr to about 15 ng/1E8 cells/hr, about 10 ng/1E8 cells/hr to about 15 ng/1E8 cells/hr, or 5 ng/1E8 cells/hr to about 10 ng/1E8 cells/hr of IL-22 in vitro.

[0024] Pharmaceutically acceptable compositions comprising the bacteria and methods of treating or preventing disorders are also provided. In some embodiments, the composition is formulated for oral or rectal administration.

[0025] In another aspect, the disclosure provides for a method of treating or preventing a disorder comprising the step of administering to a patient in need thereof, the composition provided herein.

[0026] In some embodiments, the disorder is selected from a group consisting of autoimmune disorders, cancer, metabolic diseases, diseases relating to inborn errors of metabolism, and neurological or neurodegenerative diseases.

[0027] In some embodiments, the autoimmune disorder is selected from the group consisting of acute disseminated encephalomyelitis (ADEM), acute necrotizing hemorrhagic leukoencephalitis, Addison's disease, agammaglobulinemia, alopecia areata, amyloidosis, ankylosing spondylitis, anti-GBM/anti-TBM nephritis, antiphospholipid syndrome (APS), autoimmune angioedema, autoimmune aplastic anemia, autoimmune dysautonomia, autoimmune hemolytic anemia, autoimmune hepatitis, autoimmune hyperlipidemia, autoimmune immunodeficiency, autoimmune inner ear disease (AIED), autoimmune myocarditis, autoimmune oophoritis, autoimmune pancreatitis, autoimmune retinopathy, autoimmune thrombocytopenic purpura (ATP), autoimmune thyroid disease, autoimmune urticarial, Axonal & neuronal neuropathies, Balo disease, Behcet's disease, Bullous pemphigoid, Cardiomyopathy, Castleman disease, Celiac disease, Chagas disease, Chronic inflammatory demyelinating polyneuropathy (CIDP), Chronic recurrent multifocal ostomyelitis (CRMO), Churg-Strauss syndrome, Cicatricial pemphigoid/benign mucosal pemphigoid, Crohn's disease, Cogan syndrome, Cold agglutinin disease, Congenital heart block, Coxsackie myocarditis, CREST disease, Essential mixed cryoglobulinemia, Demyelinating neuropathies, Dermatitis herpetiformis, Dermatomyositis, Devic's disease (neuromyelitis optica), Discoid lupus, Dressler's syndrome, Endometriosis, Eosinophilic esophagitis, Eosinophilic fasciitis, Erythema nodosum, Experimental allergic encephalomyelitis, Evans syndrome, Fibrosing alveolitis, Giant cell arteritis (temporal arteritis), Giant cell myocarditis, Glomerulonephritis, Goodpasture's syndrome, Granulomatosis with Polyangiitis (GPA), Graves' disease, Guillain-Barre syndrome, Hashimoto's encephalitis, Hashimoto's thyroiditis, Hemolytic anemia, Henoch-Schonlein purpura, Herpes gestationis, Hypogammaglobulinemia, Idiopathic thrombocytopenic purpura (ITP), IgA nephropathy, IgG4-related sclerosing disease, Immunoregulatory lipoproteins, Inclusion body myositis, Interstitial cystitis, Juvenile arthritis, Juvenile idiopathic arthritis, Juvenile myositis, Kawasaki syndrome, Lambert-Eaton syndrome, Leukocytoclastic vasculitis, Lichen planus, Lichen sclerosus, Ligneous conjunctivitis, Linear IgA disease (LAD), Lupus (Systemic Lupus Erythematosus), chronic Lyme disease, Meniere's disease, Microscopic polyangiitis, Mixed connective tissue disease (MCTD), Mooren's ulcer, Mucha-Habermann disease, Multiple sclerosis, Myasthenia gravis, Myositis, Narcolepsy, Neuromyelitis optica (Devic's), Neutropenia, Ocular cicatricial pemphigoid, Optic neuritis, Palindromic rheumatism, PANDAS (Pediatric autoimmune Neuropsychiatric Disorders Associated with Streptococcus), Paraneoplastic cerebellar degeneration, Paroxysmal nocturnal hemoglobinuria (PNH), Parry Romberg syndrome, Parsonnage-Turner syndrome, Pars planitis (peripheral uveitis), Pemphigus, Peripheral neuropathy, Perivenous encephalomyelitis, Pernicious anemia, POEMS syndrome, Polyarteritis nodosa, Type I, II, & III autoimmune polyglandular syndromes, Polymyalgia rheumatic, Polymyositis, Postmyocardial infarction syndrome, Postpericardiotomy syndrome, Progesterone dermatitis, Primary biliary cirrhosis, Primary sclerosing cholangitis, Psoriasis, Psoriatic arthritis, Idiopathic pulmonary fibrosis, Pyoderma gangrenosum, Pure red cell aplasia, Raynauds phenomenon, reactive arthritis, reflex sympathetic dystrophy, Reiter's syndrome, relapsing polychondritis, restless legs syndrome, retroperitoneal fibrosis, rheumatic fever, rheumatoid arthritis, sarcoidosis, Schmidt syndrome, scleritis, scleroderma, Sjogren's syndrome, sperm & testicular autoimmunity, stiff person syndrome, subacute bacterial endocarditis (SBE), Susac's syndrome, sympathetic ophthalmia, Takayasu's arteritis, temporal arteritis/giant cell arteritis, thrombocytopenic purpura (TTP), Tolosa-Hunt syndrome, transverse myelitis, type 1 diabetes, asthma, ulcerative colitis, undifferentiated connective tissue disease (UCTD), uveitis, vasculitis, vesiculobullous dermatosis, vitiligo, and Wegener's granulomatosis.

[0028] In some embodiments, the cancer is selected from adrenal cancer, adrenocortical carcinoma, anal cancer, appendix cancer, bile duct cancer, bladder cancer, bone cancer (e.g., Ewing sarcoma tumors, osteosarcoma, malignant fibrous histiocytoma), brain cancer (e.g., astrocytomas, brain stem glioma, craniopharyngioma, ependymoma), bronchial tumors, central nervous system tumors, breast cancer, Castleman disease, cervical cancer, colon cancer, rectal cancer, colorectal cancer, endometrial cancer, esophageal cancer, eye cancer, gallbladder cancer, gastrointestinal cancer, gastrointestinal carcinoid tumors, gastrointestinal stromal tumors, gestational trophoblastic disease, heart cancer, Kaposi sarcoma, kidney cancer, largyngeal cancer, hypopharyngeal cancer, leukemia (e.g., acute lymphoblastic leukemia, acute myeloid leukemia, chronic lymphocytic leukemia, chronic myelogenous leukemia), liver cancer, lung cancer, lymphoma (e.g., AIDS-related lymphoma, Burkitt lymphoma, cutaneous T cell lymphoma, Hodgkin lymphoma, Non-Hodgkin lymphoma, primary central nervous system lymphoma), malignant mesothelioma, multiple myeloma, myelodysplastic syndrome, nasal cavity cancer, paranasal sinus cancer, nasopharyngeal cancer, neuroblastoma, oral cavity cancer, oropharyngeal cancer, osteosarcoma, ovarian cancer, pancreatic cancer, penile cancer, pituitary tumors, prostate cancer, retinoblastoma, rhabdomyosarcoma, rhabdoid tumor, salivary gland cancer, sarcoma, skin cancer (e.g., basal cell carcinoma, melanoma), small intestine cancer, stomach cancer, teratoid tumor, testicular cancer, throat cancer, thymus cancer, thyroid cancer, unusual childhood cancers, urethral cancer, uterine cancer, uterine sarcoma, vaginal cancer, vulvar cancer, Waldenström macrogloblulinemia, and Wilms tumor.

[0029] In some embodiments, the metabolic disorder or condition is selected from the group consisting of: type 1 diabetes; type 2 diabetes; metabolic syndrome; Bardet-Biedel syndrome; Prader-Willi syndrome; non-alcoholic fatty liver disease; tuberous sclerosis; Albright hereditary osteodystrophy; brain-derived neurotrophic factor (BDNF) deficiency; Single-minded 1 (SIM1) deficiency; leptin deficiency; leptin receptor deficiency; pro-opiomelanocortin (POMC) defects; proprotein convertase subtilisin/kexin type 1 (PCSK1) deficiency; Src homology 2B1 (SH2B1) deficiency; pro-hormone convertase 1/3 deficiency; melanocortin-4-receptor (MC4R) deficiency; Wilms tumor, aniridia, genitourinary anomalies, and mental retardation (WAGR) syndrome; pseudohypoparathyroidism type 1A; Fragile X syndrome; Borjeson-Forsmann-Lehmann syndrome; Alstrom syndrome; Cohen syndrome; and ulnar-mammary syndrome.

### BRIEF DESCRIPTION OF THE FIGURES

[0030] FIGS. 1A-1C depict schematics of the gene organization of exemplary circuits of the disclosure for the expression of therapeutic polypeptides, which are secreted using components of the flagellar type III secretion system. A therapeutic polypeptide of interest, such as, GLP-2, IL-10, and IL-22, is assembled behind a fliC-5′UTR, and is driven by the native fliC and/or fliD promoter (FIG. 1A and FIG. 1B) or a tet-inducible promoter (FIG. 1C). The therapeutic polypeptide of interest is either expressed from a plasmid (e.g., a medium copy plasmid) or integrated into fliC loci (thereby deleting all or a portion of fliC and/or fliD). Optionally, an N terminal part of FliC is included in the construct, as shown in FIG. 1B and FIG. 1C.

[0031] FIG. 2A and FIG. 2B depict schematics of the gene organization of exemplary circuits of the disclosure for the expression of therapeutic polypeptides, which are secreted via a diffusible outer membrane (DOM) system. The therapeutic polypeptide of interest is fused to a prototypical N-terminal Sec-dependent secretion signal or Tat-dependent secretion signal, which is cleaved upon secretion into the periplasmic space. Exemplary secretion tags include sec-dependent PhoA, OmpF, OmpA, cvaC, and Tat-dependent tags (TorA, FdnG, DmsA). In certain embodiments, the recombinant bacteria comprise deletions in one or more of lpp, pal, tolA, and/or nlpI. Optionally, periplasmic proteases are also deleted, including, but not limited to, degP and ompT, e.g., to increase stability of the polypeptide in the periplasm. A FRT-KanR-FRT cassette is used for downstream integration. Expression is driven by a tet promoter (FIG. 2A) or an inducible promoter, such as oxygen level-dependent promoters (e.g., FNR-inducible promoter, FIG. 2B), promoters induced by inflammation or an inflammatory response (RNS, ROS promoters), and promoters induced by a metabolite that may or may not be naturally present (e.g., can be exogenously added) in the gut or the tumor microenvironment, e.g., arabinose.

[0032] FIG. 3 depicts a construct for the expression of GLP2-FcIgA-HIS fusion protein. The human glucagon-like peptide-2 (GLP-2) is fused to the N-terminus of the Fc portion of mouse IgA protein linked by a 20 amino acid linker. The Fc portion of mouse IgA used herein contains the hinge, CH2 and CH3 regions. An 8×HIS tag (SEQ ID NO: 1056) is fused to the C-terminus of FcIgA connected with a linker.

[0033] FIGS. 4A-4D depict schematics of non-limiting examples of recombinant bacteria of the disclosure which comprises one or more gene sequence(s) and/or gene cassette(s) as described herein.

[0034] FIG. 5 depicts a map of integration sites within the E. coli Nissle chromosome. These sites indicate regions where circuit components may be inserted into the chromosome without interfering with essential gene expression. Backslashes (/) are used to show that the insertion will occur between divergently or convergently expressed genes. Insertions within biosynthetic genes, such as thyA, can be useful for creating nutrient auxotrophies. In some embodiments, an individual circuit component is inserted into more than one of the indicated sites.

[0035] FIG. 6 depicts an exemplary schematic of the E. coli 1917 Nissle chromosome comprising multiple mechanisms of action (MoAs).

[0036] FIG. 7 depicts a schematic of a secretion system based on the flagellar type III secretion in which an incomplete flagellum is used to secrete a therapeutic peptide of interest (star) by recombinantly fusing the peptide to an N-terminal flagellar secretion signal of a native flagellar component so that the intracellularly expressed chimeric peptide can be mobilized across the inner and outer membranes into the surrounding host environment.

[0037] FIG. 8 depicts a schematic of a type V secretion system for the extracellular production of recombinant proteins in which a therapeutic peptide (star) can be fused to an N-terminal secretion signal, a linker and the beta-domain of an autotransporter.

[0038] FIG. 9 depicts a schematic of a type I secretion system, which translocates a passenger peptide directly from the cytoplasm to the extracellular space using HlyB (an ATP-binding cassette transporter); HlyD (a membrane fusion protein); and TolC (an outer membrane protein) which form a channel through both the inner and outer membranes. The secretion signal-containing C-terminal portion of HlyA is fused to the C-terminal portion of a therapeutic peptide (star) to mediate secretion of this peptide.

[0039] FIG. 10 depicts a schematic of the outer and inner membranes of a gram-negative bacterium, and several deletion targets for generating a leaky or destabilized outer membrane, thereby facilitating the translocation of a therapeutic polypeptides to the extracellular space, e.g., therapeutic polypeptides of eukaryotic origin containing disulphide bonds. Deactivating mutations of one or more genes encoding a protein that tethers the outer membrane to the peptidoglycan skeleton, e.g., lpp, ompC, ompA, ompF, tolA, tolB, pal, and/or one or more genes encoding a periplasmic protease, e.g., degS, degP, nlpl, generates a leaky phenotype. Combinations of mutations may synergistically enhance the leaky phenotype.

[0040] FIG. 11 depicts a modified type 3 secretion system (T3SS) to allow the bacteria to inject secreted therapeutic proteins into the gut lumen. An inducible promoter (small arrow, top), e.g. a FNR-inducible promoter, drives expression of the T3 secretion system gene cassette (3 large arrows, top) that produces the apparatus that secretes tagged peptides out of the cell. An inducible promoter (small arrow, bottom), e.g. a FNR-inducible promoter, drives expression of a regulatory factor, e.g. T7 polymerase, that then activates the expression of the tagged therapeutic peptide (hexagons).

[0041] FIG. 12 depicts the use of an antibiotic independent plasmid system (AIPS) as an engineered safety component. All engineered DNA is present on a plasmid which can be conditionally destroyed (Wright et al., ACS Synthetic Biology (2015) 4: 307-316).

[0042] FIGS. 13A-13D depict schematics of non-limiting examples of the gene organization of plasmids, which function as a component of a biosafety system (FIG. 13A and FIG. 13B), which also contains a chromosomal component (shown in FIG. 13C and FIG. 13D). The biosafety plasmid system vector comprises Kid Toxin and R6K minimal ori, dapA (FIG. 13A) and thyA (FIG. 13B) and promoter elements driving expression of these components. In some embodiments, bla is knocked out and replaced with one or more constructs described herein, in which a first protein of interest (POI1) and/or a second protein of interest, e.g., a transporter (POI2), and/or a third protein of interest (POI3) are expressed from an inducible or constitutive promoter. FIG. 13C and FIG. 13D depict schematics of the gene organization of the chromosomal component of a biosafety system. FIG. 13C depicts a construct comprising low copy Rep (Pi) and Kis antitoxin, in which transcription of Pi (Rep), which is required for the replication of the plasmid component of the system, is driven by a low copy RBS containing promoter. FIG. 13D depicts a construct comprising a medium-copy Rep (Pi) and Kis antitoxin, in which transcription of Pi (Rep), which is required for the replication of the plasmid component of the system, is driven by a medium copy RBS containing promoter. If the plasmid containing the functional DapA is used (as shown in FIG. 13A), then the chromosomal constructs shown in FIG. 13C and FIG. 13D are knocked into the DapA locus. If the plasmid containing the functional ThyA is used (as shown in FIG. 13B), then the chromosomal constructs shown in FIG. 13C and FIG. 13D are knocked into the ThyA locus. In this system, the bacteria comprising the chromosomal construct and a knocked out dapA or thyA gene can grow in the absence of dap or thymidine only in the presence of the plasmid.

[0043] FIG. 14 depicts a schematic of a polypeptide of interest displayed on the surface of the bacterium. A non-limiting example of such a therapeutic protein is a scFv. The polypeptide is expressed as a fusion protein, which comprises a outer membrane anchor from another protein, which was developed as part of a display system. Non-limiting examples of such anchors are described herein and include LppOmpA, NGIgAsig-NGIgAP, InaQ, Intimin, Invasin, pelB-PAL, and blcA/BAN. In a nonlimiting example, a bacterial strain has one or more diffusible outer membrane phenotype (“leaky membrane”) mutation, e.g., as described herein.

[0044] FIG. 15A depicts a schematic of the gene organization of a PssB promoter. The ssB gene product protects ssDNA from degradation; SSB interacts directly with numerous enzymes of DNA metabolism and is believed to have a central role in organizing the nucleoprotein complexes and processes involved in DNA replication (and replication restart), recombination and repair. The PssB promoter was cloned in front of a LacZ reporter and beta-galactosidase activity was measured. FIG. 15B depicts the reporter gene activity for the PssB promoter under aerobic and anaerobic conditions.

[0045] FIG. 16 depicts Western Blot analysis of total cytosolic extracts of a wild type E. coli (lane 1) and of a strain expressing anti-PD1 scFv (lane 2).

[0046] FIG. 17 depicts a diagram of a flow cytometric analysis of PD1 expressing EL4 cells which were incubated with extracts from a strain expressing tet inducible anti-PD1-scFv, and showing that anti-PD1-scFv expressed in E. coli binds to PD1 on mouse EL4 cells.

[0047] FIG. 18 depicts Western Blot analysis of total cytosolic extracts of various strain secreting anti-PD1 scFv. A single band was detected around 34 kDa in lane 1-6 corresponding to extracts from SYN2767, SYN2769, SYN2771, SYN2773, SYN2775 and SYN2777, respectively.

[0048] FIG. 19 depicts a diagram of a flow cytometric analysis of PD1 expressing EL4 cells, which were incubated with extracts from a E coli Nissle strain secreting tet-inducible anti-PD1-scFv, showing that anti-PD1-scFv secreted from E. coli Nissle binds to PD1 on mouse EL4 cells.

[0049] FIG. 20 depicts a diagram of a flow cytometric analysis of PD1 expressing EL4 cells, which were incubated with various amounts of extracts (0, 2, 5, and 15 ul) from an E. coli Nissle strain secreting tet-inducible anti-PD1-scFv, showing that anti-PD1-scFv secreted from E. coli Nissle binds to PD1 on mouse EL4 cells, in a dose dependent manner.

[0050] FIGS. 21A-21B depict diagrams of flow cytometric analysis of EL4 cells. A competition assay was conducted, in which extracts from a E coli Nissle strain secreting tet-inducible anti-PD1-scFv was incubated with various amounts of soluble PDL1 (0, 5, 10, and 30 ug) showing that PDL1 can dose-dependently compete with the binding of anti-PD1-scFv secreted from E. coli Nissle to PD1 on mouse EL4 cells.

[0051] FIG. 22 depicts Western blot analysis of bacterial supernatants showing murine CD40L1 (47-260) and CD40L2 (112-260) secreted by E. coli strains SYN3366 and SYN3367 are detected by mCD40 antibody.

[0052] FIG. 23 depicts Western blot analysis of bacterial supernatants from SYN2996 (lane 1), SYN3159 (lane 2), SYN3160 (lane 3), SYN3021 (lane 4), SYN3020 (lane 5), and SYN3161 (lane 6) showing that WT mSIRPα, mCV1SIRPα, mFD6x2SIRPα, mCV1SIRPα-IgG4, mFD6SIRPα-IgG4, and anti-mCD47 scFv are secreted from these strains, respectively.

[0053] FIG. 24 depicts a diagram of a flow cytometric analysis of CD47 expressing CT26 cells which were incubated with supernatants from a SYN1557 (1; delta PAL parental strain), SYN2996 (2; expressing tet inducible mSIRPα), SYN3021 (3; expressing tet inducible anti-mCD47scFv), SYN3161 (4; expressing tet inducible mCV1SIRPα-hIgG fusion) and showing that secreted products expressed in E. coli can bind to CD47 on mouse CT26 cells.

[0054] FIG. 25 depicts a diagram of a flow cytometric analysis of CD47 expressing CT26 cells which were incubated with supernatants from a SYN1557 (1; delta PAL parental strain), SYN3020 (2; expressing tet inducible mFD6SIRPα-hIgG fusion), SYN3160 (3; expressing tet inducible FD1x2SIRPα), SYN3159 (4; expressing tet inducible mCV1SIRPα), SYN3021 (5; expressing tet inducible mCV1SIRPα-hIgG fusion) and showing that secreted products expressed in E. coli can bind to CD47 on mouse CT26 cells.

[0055] FIG. 26 depicts a diagram of a flow cytometric analysis of CT26 cells. A competition assay was conducted, in which extracts from a E coli Nissle strain secreting tet-inducible murine SIRPalpha was incubated with recombinant SIRPalpha showing that recombinant SIRPalpha can compete with the binding of SIRPalpha secreted from E. coli Nissle to CD47 on CT26 cells.

[0056] FIG. 27 depicts a diagram of a flow cytometric analysis of CT26 cells. A competition assay was conducted, in which extracts from a E coli Nissle strain secreting tet-inducible murine SIRPalpha was incubated with an anti-CD47 antibody showing that the antibody can compete with the binding of SIRPalpha secreted from E. coli Nissle to CD47 on CT26 cells.

[0057] FIG. 28A depicts the circuitry for the secretion of mouse and human hyaluronidases expressed in SYN2997 and SYN2998. FIG. 28B depicts a Western blot analysis of bacterial supernatants from SYN2997 (lane 1) and SYN2998 (lane 2), showing that mouse and human hyaluronidases are secreted from these strains, respectively.

[0058] FIG. 29 depicts a bar graph showing hyaluronidase activity of SYN1557 (parental strain delta PAL), SYN2997 and SYN2998 as a measure of hyluronan degradation in an ELISA assay.

[0059] FIG. 30A depicts Western blot analysis of bacterial supernatants from SYN3369 expressing tetracycline inducible leech hyaluronidase (lane 1) and SYN1557 (parental strain delta PAL) (lane 2), showing that leech hyaluronidase is secreted from SYN3369. M=Marker. FIG. 30B and FIG. 30C depict bar graphs showing hyaluronidase activity as a measure of hyluronan degradation in an ELISA assay. FIG. 30B shows a positive control with recombinant hyaluronidase. FIG. 30C shows hyaluronidase activity of SYN1557 (parental strain delta PAL), and SYN3369 expressing tetracycline inducible leech hyaluronidase.

[0060] FIG. 31 depicts a bar graph showing levels of CXCL10 secreted from various strains into culture supernatant.

[0061] FIG. 32 depicts a bar graph showing levels of IL-15-Sushi fusion protein secreted from various strains into culture supernatant.

[0062] FIG. 33 depicts a schematic of a construct of the disclosure comprising a GLP2-linker-IL10-linker-IL-10 fusion protein.

[0063] FIG. 34 depicts a schematic of a construct of the disclosure comprising a GLP2-IL-22 fusion protein.

[0064] FIG. 35 depicts IL-22 secreting strains overview.

[0065] FIG. 36 depicts in vitro production and biological activity of secreted IL-12.

[0066] FIG. 37 depicts in vivo production and biological activity of secreted IL-12.

[0067] FIG. 38 depicts kinetics of IL-22 production in vivo during inflammation.

[0068] FIG. 39A depicts a schematic of IL-2 secreting strains. FIG. 39B depicts a schematic of DOM mutation. FIG. 39C depicts in vitro production and secretion of hIL-2 (pg/1E9 cells/hr).

[0069] FIG. 40A depicts a schematic of IL-2 secreting strains with Apal deletion. FIG. 40B depicts in vitro production and secretion of hIL-2 (ng/1E9 cells/hr). FIG. 40C depicts bioactive IL-2 concentration from IL-2 secreting E. coli compared to a control strain.

[0070] FIG. 41A depicts a schematic of IL15Rα-IL15 secreting strains. FIG. 41B depicts in vitro production and secretion of IL15Rα-IL15 (ng/1E9 cells/hr). FIG. 41C depicts bioactive IL15Rα-IL15 concentration from IL15Rα-IL15 secreting E. coli compared to a control strain.

[0071] FIG. 42A depicts a schematic of the protein-producing bacterial strain (hIL-22) containing ΔPAL mutation (parental strain SYN1557), FnR promoter, optimized RBS and signaling peptide (phoA). FIG. 42B depicts bar graph measurement of IL-22 production in vitro from the engineered E. coli Nissle strain (EcN-IL22) compared to the control strains with incomplete secretion machinery: Secretion depends on the presence of signaling peptide phoA and significantly increases with engineering DOM (ΔPAL) mutant as compared to WT strain (parental strain SYN094).

### DETAILED DESCRIPTION

[0072] The present disclosure relates to compositions of recombinant bacteria and methods for secreting therapeutically active proteins from recombinant bacteria for treatment of diseases or disorders. The recombinant bacteria disclosed herein are capable of high yield production of functionally active effector molecules, which are secreted as therapeutically active polypeptides.

### Definitions

[0073] In order that the disclosure may be more readily understood, certain terms are first defined. These definitions should be read in light of the remainder of the disclosure and as understood by a person of ordinary skill in the art. Unless defined otherwise, all technical and scientific terms used herein have the same meaning as commonly understood by a person of ordinary skill in the art. Additional definitions are set forth throughout the detailed description.

[0074] As used herein, “effector molecules” or “therapeutic molecules” or “therapeutic polypeptides” include, but are not limited to, anti-inflammation molecules and/or gut barrier function enhancer molecules, such as GLP-2, IL-22, IL-10, IL-27, IL-19, IL-20, IL-25, IL-15, IL-2, IL-1beta, IL-6, IL-8, UL-17, GMCSF, TNFalpha, IFNgamma, CXCL-8, CCL2, CXCL10, CXCL9, hyaluronidase, CLTA-4, PD1, PDL1, CD47, and CD40L. Such molecules may also include compounds that inhibit pro-inflammatory molecules, e.g., a single-chain variable fragment (scFv), antisense RNA, siA, or shRNA that neutralizes TNF-α, IFN-γ, IL-113, IL-6, IL-8, IL-17, and/or chemokines, e.g., CXCL-8 and CCL2. A molecule may be primarily anti-inflammatory, e.g., IL-10, or primarily gut barrier function enhancing, e.g., GLP-2. A molecule may be both anti-inflammatory and gut barrier function enhancing. An anti-inflammation and/or gut barrier function enhancer molecule may be encoded by a single gene, e.g., elafin is encoded by the PI3 gene. Alternatively, an anti-inflammation and/or gut barrier function enhancer molecule may be synthesized by a biosynthetic pathway requiring multiple genes, e.g., butyrate. In some instances, the effector molecules” or “therapeutic molecules” or “therapeutic polypeptides” are referred to herein as “anti-inflammation molecules” and/or “gut barrier function enhancer molecules”.

[0075] As used herein, the term “recombinant microorganism” refers to a microorganism, e.g., bacterial, yeast, or viral cell, or bacteria, yeast, or virus, that has been genetically modified from its native state. Thus, a “recombinant bacterial cell” or “recombinant bacteria” refers to a bacterial cell or bacteria that have been genetically modified from their native state. For instance, a recombinant bacterial cell may have nucleotide insertions, nucleotide deletions, nucleotide rearrangements, and nucleotide modifications introduced into their DNA. These genetic modifications may be present in the chromosome of the bacteria or bacterial cell, or on a plasmid in the bacteria or bacterial cell. Recombinant bacterial cells disclosed herein may comprise exogenous nucleotide sequences on plasmids. Alternatively, recombinant bacterial cells may comprise exogenous nucleotide sequences stably incorporated into their chromosome.

[0076] A “programmed or engineered microorganism” refers to a microorganism, e.g., bacterial or viral cell, or bacteria or virus, that has been genetically modified from its native state to perform a specific function. Thus, a “programmed or engineered bacterial cell” or “programmed or engineered bacteria” refers to a bacterial cell or bacteria that has been genetically modified from its native state to perform a specific function. In certain embodiments, the programmed or engineered bacterial cell has been modified to express one or more proteins, for example, one or more proteins that have a therapeutic activity or serve a therapeutic purpose. The programmed or engineered bacterial cell may additionally have the ability to stop growing or to destroy itself once the protein(s) of interest have been expressed.

[0077] As used herein, the term “gene” refers to a nucleic acid fragment that encodes a protein or fragment thereof, optionally including regulatory sequences preceding (5′ non-coding sequences) and following (3′ non-coding sequences) the coding sequence. In one embodiment, a “gene” does not include regulatory sequences preceding and following the coding sequence. A “native gene” refers to a gene as found in nature, optionally with its own regulatory sequences preceding and following the coding sequence. A “chimeric gene” refers to any gene that is not a native gene, optionally comprising regulatory sequences preceding and following the coding sequence, wherein the coding sequences and/or the regulatory sequences, in whole or in part, are not found together in nature. Thus, a chimeric gene may comprise regulatory sequences and coding sequences that are derived from different sources, or regulatory and coding sequences that are derived from the same source, but arranged differently than is found in nature.

[0078] As used herein, the term “gene sequence” is meant to refer to a genetic sequence, e.g., a nucleic acid sequence. The gene sequence or genetic sequence is meant to include a complete gene sequence or a partial gene sequence. The gene sequence or genetic sequence is meant to include sequence that encodes a protein or polypeptide and is also meant to include genetic sequence that does not encode a protein or polypeptide, e.g., a regulatory sequence, leader sequence, signal sequence, or other non-protein coding sequence.

[0079] In some embodiments, the term “gene” or “gene sequence” is meant to refer to a nucleic acid sequence encoding any of the effector molecules described herein, e.g., gut barrier enhancers, anti or proinflammatory, anti-cancer molecules and others. The nucleic acid sequence may comprise the entire gene sequence or a partial gene sequence encoding a functional molecule. The nucleic acid sequence may be a natural sequence or a synthetic sequence. The nucleic acid sequence may comprise a native or wild-type sequence or may comprise a modified sequence having one or more insertions, deletions, substitutions, or other modifications, for example, the nucleic acid sequence may be codon-optimized.

[0080] As used herein, a “heterologous” gene or “heterologous sequence” refers to a nucleotide sequence that is not normally found in a given cell in nature. As used herein, a heterologous sequence encompasses a nucleic acid sequence that is exogenously introduced into a given cell and can be a native sequence (naturally found or expressed in the cell) or non-native sequence (not naturally found or expressed in the cell) and can be a natural or wild-type sequence or a variant, non-natural, or synthetic sequence. “Heterologous gene” includes a native gene, or fragment thereof, that has been introduced into the host cell in a form that is different from the corresponding native gene. For example, a heterologous gene may include a native coding sequence that is a portion of a chimeric gene to include non-native regulatory regions that is reintroduced into the host cell. A heterologous gene may also include a native gene, or fragment thereof, introduced into a non-native host cell. Thus, a heterologous gene may be foreign or native to the recipient cell; a nucleic acid sequence that is naturally found in a given cell but expresses an unnatural amount of the nucleic acid and/or the polypeptide which it encodes; and/or two or more nucleic acid sequences that are not found in the same relationship to each other in nature. As used herein, the term “endogenous gene” refers to a native gene in its natural location in the genome of an organism. As used herein, the term “transgene” refers to a gene that has been introduced into the host organism, e.g., host bacterial cell, genome.

[0081] As used herein, a “non-native” nucleic acid sequence refers to a nucleic acid sequence not normally present in a microorganism, e.g., an extra copy of an endogenous sequence, or a heterologous sequence such as a sequence from a different species, strain, or substrain of bacteria or virus, or a sequence that is modified and/or mutated as compared to the unmodified sequence from bacteria or virus of the same subtype. In some embodiments, the non-native nucleic acid sequence is a synthetic, non-naturally occurring sequence (see, e.g., Purcell et al., 2013). The non-native nucleic acid sequence may be a regulatory region, a promoter, a gene, and/or one or more genes in gene cassette. In some embodiments, “non-native” refers to two or more nucleic acid sequences that are not found in the same relationship to each other in nature. The non-native nucleic acid sequence may be present on a plasmid or chromosome. In some embodiments, the genetically engineered microorganism of the disclosure comprises a gene that is operably linked to a promoter that is not associated with said gene in nature. For example, in some embodiments, the recombinant bacteria disclosed herein comprise a gene that is operably linked to a directly or indirectly inducible promoter that is not associated with said gene in nature, e.g., an FNR responsive promoter (or other promoter disclosed herein) operably linked to an effector molecule, e.g., an anti-inflammatory or gut barrier enhancer molecule, or a pro-inflammatory or an anti-cancer molecule.

[0082] As used herein, the term “coding region” refers to a nucleotide sequence that codes for a specific amino acid sequence. The term “regulatory sequence” refers to a nucleotide sequence located upstream (5′ non-coding sequences), within, or downstream (3′ non-coding sequences) of a coding sequence, and which influences the transcription, RNA processing, RNA stability, or translation of the associated coding sequence. Examples of regulatory sequences include, but are not limited to, promoters, translation leader sequences, effector binding sites, signal sequences, and stem-loop structures. In one embodiment, the regulatory sequence comprises a promoter, e.g., an FNR responsive promoter or other promoter disclosed herein.

[0083] As used herein, a “gene cassette” or “operon” encoding a biosynthetic pathway refers to the two or more genes that are required to produce an effector molecule, e.g., an anti-inflammatory or gut barrier enhancer molecule or a pro-inflammatory or an anti-cancer molecule or another effector molecule. In addition to encoding a set of genes capable of producing said molecule, the gene cassette or operon may also comprise additional transcription and translation elements, e.g., a ribosome binding site.

[0084] A regulatory region “operably linked” refers to the association of nucleic acid sequences on a single nucleic acid fragment so that the function of one is affected by the other. A regulatory element is operably linked with a coding sequence when it is capable of affecting the expression of the gene coding sequence, regardless of the distance between the regulatory element and the coding sequence. More specifically, operably linked refers to a nucleic acid sequence, e.g., a gene encoding an effector molecule, that is joined to a regulatory sequence in a manner which allows expression of the nucleic acid sequence, e.g., the gene encoding the effector molecule described herein. In other words, the regulatory sequence acts in cis. In one embodiment, a gene may be “directly linked” to a regulatory sequence in a manner which allows expression of the gene. In another embodiment, a gene may be “indirectly linked” to a regulatory sequence in a manner which allows expression of the gene. In one embodiment, two or more genes may be directly or indirectly linked to a regulatory sequence in a manner which allows expression of the two or more genes. A regulatory region or sequence is a nucleic acid that can direct transcription of a gene of interest and may comprise promoter sequences, enhancer sequences, response elements, protein recognition sites, inducible elements, promoter control elements, protein binding sequences, 5′ and 3′-untranslated regions, transcriptional start sites, termination sequences, polyadenylation sequences and introns.

[0085] A “promoter” as used herein, refers to a nucleotide sequence that is capable of controlling the expression of a coding sequence or gene. Promoters are generally located 5′ of the sequence that they regulate. Promoters may be derived in their entirety from a native gene, or be composed of different elements derived from promoters found in nature, and/or comprise synthetic nucleotide segments. Those skilled in the art will readily ascertain that different promoters may regulate expression of a coding sequence or gene in response to a particular stimulus, e.g., in a cell- or tissue-specific manner, in response to different environmental or physiological conditions, or in response to specific compounds. Prokaryotic promoters are typically classified into two classes: inducible and constitutive. A “constitutive promoter” refers to a promoter that allows for continual transcription of the coding sequence or gene under its control.

[0086] “Constitutive promoter” refers to a promoter that is capable of facilitating continuous transcription of a coding sequence or gene under its control and/or to which it is operably linked. Constitutive promoters and variants are well known in the art and include, but are not limited to, Ptac promoter, BBa_J23100, a constitutive Escherichia coli σS promoter (e.g., an osmY promoter (International Genetically Engineered Machine (iGEM) Registry of Standard Biological Parts Name BBa_J45992; BBa_J45993)), a constitutive Escherichia coli σ32 promoter (e.g., htpG heat shock promoter (BBa_J45504)), a constitutive Escherichia coli σ70 promoter (e.g., lacq promoter (BBa_J54200; BBa_J56015), E. coli CreABCD phosphate sensing operon promoter (BBa_J64951), GlnRS promoter (BBa_K088007), lacZ promoter (BBa_K119000; BBa_K119001); M13K07 gene I promoter (BBa_M13101); M13K07 gene II promoter (BBa_M13102), M13K07 gene III promoter (BBa_M13103), M13K07 gene IV promoter (BBa_M13104), M13K07 gene V promoter (BBa_M13105), M13K07 gene VI promoter (BBa_M13106), M13K07 gene VIII promoter (BBa_M13108), M13110 (BBa_M13110)), a constitutive Bacillus subtilis σA promoter (e.g., promoter veg (BBa_K143013), promoter 43 (BBa_K143013), PliaG (BBa_K823000), PlepA (BBa_K823002), Pveg (BBa_K823003)), a constitutive Bacillus subtilis σB promoter (e.g., promoter ctc (BBa_K143010), promoter gsiB (BBa_K143011)), a Salmonella promoter (e.g., Pspv2 from Salmonella (BBa_K112706), Pspv from Salmonella (BBa_K112707)), a bacteriophage T7 promoter (e.g., T7 promoter (BBa_I712074; BBa_I719005; BBa_J34814; BBa_J64997; BBa_K113010; BBa_K113011; BBa_K113012; BBa_R0085; BBa_R0180; BBa_R0181; BBa_R0182; BBa_R0183; BBa_Z0251; BBa_Z0252; BBa_Z0253)), and a bacteriophage SP6 promoter (e.g., SP6 promoter (BBa_J64998)).

[0087] An “inducible promoter” refers to a regulatory region that is operably linked to one or more genes, wherein expression of the gene(s) is increased in the presence of an inducer of said regulatory region. An “inducible promoter” refers to a promoter that initiates increased levels of transcription of the coding sequence or gene under its control in response to a stimulus or an exogenous environmental condition. A “directly inducible promoter” refers to a regulatory region, wherein the regulatory region is operably linked to a gene encoding a protein or polypeptide, where, in the presence of an inducer of said regulatory region, the protein or polypeptide is expressed. An “indirectly inducible promoter” refers to a regulatory system comprising two or more regulatory regions, for example, a first regulatory region that is operably linked to a first gene encoding a first protein, polypeptide, or factor, e.g., a transcriptional regulator, which is capable of regulating a second regulatory region that is operably linked to a second gene, the second regulatory region may be activated or repressed, thereby activating or repressing expression of the second gene. Both a directly inducible promoter and an indirectly inducible promoter are encompassed by “inducible promoter.”

[0088] As used herein, “stably maintained” or “stable” bacterium is used to refer to a bacterial host cell carrying non-native genetic material, e.g., a gene encoding one or more effector molecule(s), which is incorporated into the host genome or propagated on a self-replicating extra-chromosomal plasmid, such that the non-native genetic material is retained, expressed, and propagated. The stable bacterium is capable of survival and/or growth in vitro, e.g., in medium, and/or in vivo, e.g., in the gut. For example, the stable bacterium may be a recombinant bacterium comprising a gene encoding a encoding a payload, e.g., one or more effector molecule(s), in which the plasmid or chromosome carrying the gene is stably maintained in the bacterium, such that the payload can be expressed in the bacterium, and the bacterium is capable of survival and/or growth in vitro and/or in vivo. In some embodiments, copy number affects the stability of expression of the non-native genetic material. In some embodiments, copy number affects the level of expression of the non-native genetic material.

[0089] As used herein, the term “expression” refers to the transcription and stable accumulation of sense (mRNA) or anti-sense RNA derived from a nucleic acid, and/or to translation of an mRNA into a polypeptide.

[0090] As used herein, the term “plasmid” or “vector” refers to an extrachromosomal nucleic acid, e.g., DNA, construct that is not integrated into a bacterial cell's genome. Plasmids are usually circular and capable of autonomous replication. Plasmids may be low-copy, medium-copy, or high-copy, as is well known in the art. Plasmids may optionally comprise a selectable marker, such as an antibiotic resistance gene, which helps select for bacterial cells containing the plasmid and which ensures that the plasmid is retained in the bacterial cell. A plasmid disclosed herein may comprise a nucleic acid sequence encoding a heterologous gene, e.g., a gene encoding effector molecule.

[0091] As used herein, the term “transform” or “transformation” refers to the transfer of a nucleic acid fragment into a host bacterial cell, resulting in genetically-stable inheritance. Host bacterial cells comprising the transformed nucleic acid fragment are referred to as “recombinant” or “transgenic” or “transformed” organisms.

[0092] The term “genetic modification,” as used herein, refers to any genetic change. Exemplary genetic modifications include those that increase, decrease, or abolish the expression of a gene, including, for example, modifications of native chromosomal or extrachromosomal genetic material. Exemplary genetic modifications also include the introduction of at least one plasmid, modification, mutation, base deletion, base addition, base substitution, and/or codon modification of chromosomal or extrachromosomal genetic sequence(s), gene over-expression, gene amplification, gene suppression, promoter modification or substitution, gene addition (either single or multi-copy), antisense expression or suppression, or any other change to the genetic elements of a host cell, whether the change produces a change in phenotype or not. Genetic modification can include the introduction of a plasmid, e.g., a plasmid comprising an effector molecule operably linked to a promoter, into a bacterial cell. Genetic modification can also involve a targeted replacement in the chromosome, e.g., to replace a native gene promoter with an inducible promoter, regulated promoter, strong promoter, or constitutive promoter. Genetic modification can also involve gene amplification, e.g., introduction of at least one additional copy of a native gene into the chromosome of the cell. Alternatively, chromosomal genetic modification can involve a genetic mutation.

[0093] As used herein, the term “genetic mutation” refers to a change or changes in a nucleotide sequence of a gene or related regulatory region that alters the nucleotide sequence as compared to its native or wild-type sequence. Mutations include, for example, substitutions, additions, and deletions, in whole or in part, within the wild-type sequence. Such substitutions, additions, or deletions can be single nucleotide changes (e.g., one or more point mutations), or can be two or more nucleotide changes, which may result in substantial changes to the sequence. Mutations can occur within the coding region of the gene as well as within the non-coding and regulatory sequence of the gene. The term “genetic mutation” is intended to include silent and conservative mutations within a coding region as well as changes which alter the amino acid sequence of the polypeptide encoded by the gene. A genetic mutation in a gene coding sequence may, for example, increase, decrease, or otherwise alter the activity (e.g., enzymatic activity) of the gene's polypeptide product. A genetic mutation in a regulatory sequence may increase, decrease, or otherwise alter the expression of sequences operably linked to the altered regulatory sequence.

[0094] As used herein, the term “transporter” is meant to refer to a mechanism, e.g., protein, proteins, or protein complex, for importing a molecule, e g, amino acid, peptide (di-peptide, tri-peptide, polypeptide, etc), toxin, metabolite, substrate, as well as other biomolecules into the microorganism from the extracellular milieu.

[0095] As used herein, the phrase “exogenous environmental condition” or “exogenous environment signal” refers to settings, circumstances, stimuli, or biological molecules under which a promoter described herein is directly or indirectly induced. The phrase “exogenous environmental conditions” is meant to refer to the environmental conditions external to the engineered microorganism, but endogenous or native to the host subject environment. Thus, “exogenous” and “endogenous” may be used interchangeably to refer to environmental conditions in which the environmental conditions are endogenous to a mammalian body, but external or exogenous to an intact microorganism cell. In some embodiments, the exogenous environmental conditions are specific to the gut of a mammal. In some embodiments, the exogenous environmental conditions are specific to the upper gastrointestinal tract of a mammal. In some embodiments, the exogenous environmental conditions are specific to the lower gastrointestinal tract of a mammal. In some embodiments, the exogenous environmental conditions are specific to the small intestine of a mammal. In some embodiments, the exogenous environmental conditions are specific to the tumor microenvironment. In some embodiments, the exogenous environmental conditions are low-oxygen, microaerobic, or anaerobic conditions, such as the environment of the mammalian gut or the tumor microenvironment. In some embodiments, exogenous environmental conditions are molecules or metabolites that are specific to the mammalian gut, e.g., propionate. In some embodiments, the exogenous environmental condition is a tissue-specific or disease-specific metabolite or molecule(s). In some embodiments, the exogenous environmental condition is specific to an inflammatory disease. In some embodiments, the exogenous environmental condition is a low-pH environment. In some embodiments, the genetically engineered microorganism of the disclosure comprises a pH-dependent promoter. In some embodiments, the genetically engineered microorganism of the disclosure comprise an oxygen level-dependent promoter. In some aspects, bacteria have evolved transcription factors that are capable of sensing oxygen levels. Different signaling pathways may be triggered by different oxygen levels and occur with different kinetics. An “oxygen level-dependent promoter” or “oxygen level-dependent regulatory region” refers to a nucleic acid sequence to which one or more oxygen level-sensing transcription factors is capable of binding, wherein the binding and/or activation of the corresponding transcription factor activates downstream gene expression.

[0096] Examples of oxygen level-dependent transcription factors include, but are not limited to, FNR (fumarate and nitrate reductase), ANR (anaerobic nitrate respiration), and DNR (dissimilatory nitrate respiration regulator). Corresponding FNR-responsive promoters, ANR-responsive promoters, and DNR-responsive promoters are known in the art (see, e.g., Castiglione et al., 2009; Eiglmeier et al., 1989; Galimand et al., 1991; Hasegawa et al., 1998; Hoeren et al., 1993; Salmon et al., 2003), and non-limiting examples are shown in Table 1A.

[0097] In a non-limiting example, a promoter (PfnrS) was derived from the E. coli Nissle fumarate and nitrate reductase gene S (fnrS) that is known to be highly expressed under conditions of low or no environmental oxygen (Durand and Storz, 2010; Boysen et al, 2010). The PfnrS promoter is activated under anaerobic conditions by the global transcriptional regulator FNR that is naturally found in Nissle. Under anaerobic conditions, FNR forms a dimer and binds to specific sequences in the promoters of specific genes under its control, thereby activating their expression. However, under aerobic conditions, oxygen reacts with iron-sulfur clusters in FNR dimers and converts them to an inactive form. In this way, the PfnrS inducible promoter is adopted to modulate the expression of proteins or RNA. PfnrS is used interchangeably in this application as FNRS, fnrs, FNR, P-FNRS promoter and other such related designations to indicate the promoter PfnrS.

TABLE 1A
Examples of transcription factors and
responsive genes and regulatory regions

| | Examples of responsive genes, promoters, |
|---|---|
| Transcription Factor | and/or regulatory regions: |
| FNR | nirB, ydfZ, pdhR, focA, ndH, hlyE, narK, |
| | narX, narG, yfiD, tdcD |
| ANR | arcDABC |
| DNR | norb, norC |

[0098] As used herein, a “tunable regulatory region” refers to a nucleic acid sequence under direct or indirect control of a transcription factor and which is capable of activating, repressing, derepressing, or otherwise controlling gene expression relative to levels of an inducer. In some embodiments, the tunable regulatory region comprises a promoter sequence. The inducer may be RNS, or other inducer described herein, and the tunable regulatory region may be a RNS-responsive regulatory region or other responsive regulatory region described herein. The tunable regulatory region may be operatively linked to a gene sequence(s) or gene cassette for the production of one or more payloads, e.g., an effector molecule gene cassette or gene sequence(s). For example, in one specific embodiment, the tunable regulatory region is a RNS-derepressible regulatory region, and when RNS is present, a RNS-sensing transcription factor no longer binds to and/or represses the regulatory region, thereby permitting expression of the operatively linked gene or gene cassette. In this instance, the tunable regulatory region derepresses gene or gene cassette expression relative to RNS levels. Each gene or gene cassette may be operatively linked to a tunable regulatory region that is directly or indirectly controlled by a transcription factor that is capable of sensing at least one RNS.

[0099] In some embodiments, the exogenous environmental conditions are the presence or absence of reactive oxygen species (ROS). In other embodiments, the exogenous environmental conditions are the presence or absence of reactive nitrogen species (RNS). In some embodiments, exogenous environmental conditions are biological molecules that are involved in the inflammatory response, for example, molecules present in an inflammatory disorder of the gut. In some embodiments, the exogenous environmental conditions or signals exist naturally or are naturally absent in the environment in which the recombinant bacterial cell resides. In some embodiments, the exogenous environmental conditions or signals are artificially created, for example, by the creation or removal of biological conditions and/or the administration or removal of biological molecules.

[0100] In some embodiments, the exogenous environmental condition(s) and/or signal(s) stimulates the activity of an inducible promoter. In some embodiments, the exogenous environmental condition(s) and/or signal(s) that serves to activate the inducible promoter is not naturally present within the gut or any other organ of a mammal. In some embodiments, the inducible promoter is stimulated by a molecule or metabolite that is administered in combination with the pharmaceutical composition of the disclosure, for example, tetracycline, arabinose, or any biological molecule that serves to activate an inducible promoter. In some embodiments, the exogenous environmental condition(s) and/or signal(s) is added to culture media comprising a recombinant bacterial cell of the disclosure. In some embodiments, the exogenous environmental condition that serves to activate the inducible promoter is naturally present within the gut of a mammal (for example, low oxygen or anaerobic conditions, or biological molecules involved in an inflammatory response). In some embodiments, the molecule that activates the inducible promoter is present in the tumor microenvironment. In some embodiments, the loss of exposure to an exogenous environmental condition (for example, in vivo) inhibits the activity of an inducible promoter, as the exogenous environmental condition is not present to induce the promoter (for example, an aerobic environment outside the gut). “Gut” refers to the organs, glands, tracts, and systems that are responsible for the transfer and digestion of food, absorption of nutrients, and excretion of waste. In humans, the gut comprises the gastrointestinal (GI) tract, which starts at the mouth and ends at the anus, and additionally comprises the esophagus, stomach, small intestine, and large intestine. The gut also comprises accessory organs and glands, such as the spleen, liver, gallbladder, and pancreas. The upper gastrointestinal tract comprises the esophagus, stomach, and duodenum of the small intestine. The lower gastrointestinal tract comprises the remainder of the small intestine, i.e., the jejunum and ileum, and all of the large intestine, i.e., the cecum, colon, rectum, and anal canal. Bacteria can be found throughout the gut, e.g., in the gastrointestinal tract, and particularly in the intestines.

[0101] “Hypoxia” is used to refer to reduced oxygen supply to a tissue as compared to physiological levels, thereby creating an oxygen-deficient environment. “Normoxia” refers to a physiological level of oxygen supply to a tissue. Hypoxia is a hallmark of solid tumors and characterized by regions of low oxygen and necrosis due to insufficient perfusion.

[0102] As used herein, the term “low oxygen” is meant to refer to a level, amount, or concentration of oxygen (O₂) that is lower than the level, amount, or concentration of oxygen that is present in the atmosphere (e.g., <21% O₂; <160 torr O₂)). Thus, the term “low oxygen condition or conditions” or “low oxygen environment” refers to conditions or environments containing lower levels of oxygen than are present in the atmosphere. In some embodiments, the term “low oxygen” is meant to refer to the level, amount, or concentration of oxygen (O₂) found in a mammalian gut, e.g., lumen, stomach, small intestine, duodenum, jejunum, ileum, large intestine, cecum, colon, distal sigmoid colon, rectum, and anal canal. In some embodiments, the term “low oxygen” is meant to refer to a level, amount, or concentration of O₂ that is 0-60 mmHg O₂ (0-60 torr O₂) (e.g., 0, 1, 2, 3, 4, 5, 6, 7, 8, 9, 10, 11, 12, 13, 14, 15, 16, 17, 18, 19, 20, 21, 22, 23, 24, 25, 26, 27, 28, 29, 30, 31, 32, 33, 34, 35, 36, 37, 38, 39, 40, 41, 42, 43, 44, 45, 46, 47, 48, 49, 50, 51, 52, 53, 54, 55, 56, 57, 58, 59, and 60 mmHg O₂), including any and all incremental fraction(s) thereof (e.g., 0.2 mmHg, 0.5 mmHg O₂, 0.75 mmHg O₂, 1.25 mmHg O₂, 2.175 mmHg O₂, 3.45 mmHg O₂, 3.75 mmHg O₂, 4.5 mmHg O₂, 6.8 mmHg O₂, 11.35 mmHg O₂, 46.3 mmHg O₂, 58.75 mmHg, etc., which exemplary fractions are listed here for illustrative purposes and not meant to be limiting in any way). In some embodiments, “low oxygen” refers to about 60 mmHg O₂ or less (e.g., 0 to about 60 mmHg O₂). The term “low oxygen” may also refer to a range of O₂ levels, amounts, or concentrations between 0-60 mmHg O₂ (inclusive), e.g., 0-5 mmHg O₂, <1.5 mmHg O₂, 6-10 mmHg, <8 mmHg, 47-60 mmHg, etc. which listed exemplary ranges are listed here for illustrative purposes and not meant to be limiting in any way. See, for example, Albenberg et al., Gastroenterology, 147(5): 1055-1063 (2014); Bergofsky et al., J Clin. Invest., 41(11): 1971-1980 (1962); Crompton et al., J Exp. Biol., 43: 473-478 (1965); He et al., PNAS (USA), 96: 4586-4591 (1999); McKeown, Br. J. Radiol., 87:20130676 (2014) (doi: 10.1259/brj.20130676), each of which discusses the oxygen levels found in the mammalian gut of various species and each of which are incorportated by reference herewith in their entireties. In some embodiments, the term “low oxygen” is meant to refer to the level, amount, or concentration of oxygen (O₂) found in a mammalian organ or tissue other than the gut, e.g., urogenital tract, tumor tissue, etc. in which oxygen is present at a reduced level, e.g., at a hypoxic or anoxic level. In some embodiments, “low oxygen” is meant to refer to the level, amount, or concentration of oxygen (O₂) present in partially aerobic, semi aerobic, microaerobic, nanoaerobic, microoxic, hypoxic, anoxic, and/or anaerobic conditions. For example, Table 1B summarizes the amount of oxygen present in various organs and tissues. In some embodiments, the level, amount, or concentration of oxygen (O₂) is expressed as the amount of dissolved oxygen (“DO”) which refers to the level of free, non-compound oxygen (O₂) present in liquids and is typically reported in milligrams per liter (mg/L), parts per million (ppm; 1 mg/L=1 ppm), or in micromoles (umole) (1 umole O₂=0.022391 mg/L O₂). Fondriest Environmental, Inc., “Dissolved Oxygen”, Fundamentals of Environmental Measurements, 19 Nov. 2013, www.fondriest.com/environmental-measurements/parameters/water-quality/dissolved-oxygen/>. In some embodiments, the term “low oxygen” is meant to refer to a level, amount, or concentration of oxygen (O₂) that is about 6.0 mg/L DO or less, e.g., 6.0 mg/L, 5.0 mg/L, 4.0 mg/L, 3.0 mg/L, 2.0 mg/L, 1.0 mg/L, or 0 mg/L, and any fraction therein, e.g., 3.25 mg/L, 2.5 mg/L, 1.75 mg/L, 1.5 mg/L, 1.25 mg/L, 0.9 mg/L, 0.8 mg/L, 0.7 mg/L, 0.6 mg/L, 0.5 mg/L, 0.4 mg/L, 0.3 mg/L, 0.2 mg/L and 0.1 mg/L DO, which exemplary fractions are listed here for illustrative purposes and not meant to be limiting in any way. The level of oxygen in a liquid or solution may also be reported as a percentage of air saturation or as a percentage of oxygen saturation (the ratio of the concentration of dissolved oxygen (O₂) in the solution to the maximum amount of oxygen that will dissolve in the solution at a certain temperature, pressure, and salinity under stable equilibrium). Well-aerated solutions (e.g., solutions subjected to mixing and/or stirring) without oxygen producers or consumers are 100% air saturated. In some embodiments, the term “low oxygen” is meant to refer to 40% air saturation or less, e.g., 40%, 39%, 38%, 37%, 36%, 35%, 34%, 33%, 32%, 31%, 30%, 29%, 28%, 27%, 26%, 25%, 24%, 23%, 22%, 21%, 20%, 19%, 18%, 17%, 16%, 15%, 14%, 13%, 12%, 11%, 10%, 9%, 8%, 7%, 6%, 5%, 4%, 3%, 2%, 1%, and 0% air saturation, including any and all incremental fraction(s) thereof (e.g., 30.25%, 22.70%, 15.5%, 7.7%, 5.0%, 2.8%, 2.0%, 1.65%, 1.0%, 0.9%, 0.8%, 0.75%, 0.68%, 0.5%. 0.44%, 0.3%, 0.25%, 0.2%, 0.1%, 0.08%, 0.075%, 0.058%, 0.04%. 0.032%, 0.025%, 0.01%, etc.) and any range of air saturation levels between 0-40%, inclusive (e.g., 0-5%, 0.05-0.1%, 0.1-0.2%, 0.1-0.5%, 0.5-2.0%, 0-10%, 5-10%, 10-15%, 15-20%, 20-25%, 25-30%, etc.). The exemplary fractions and ranges listed here are for illustrative purposes and not meant to be limiting in any way. In some embodiments, the term “low oxygen” is meant to refer to 9% O₂ saturation or less, e.g., 9%, 8%, 7%, 6%, 5%, 4%, 3%, 2%, 1%, 0%, O₂ saturation, including any and all incremental fraction(s) thereof (e.g., 6.5%, 5.0%, 2.2%, 1.7%, 1.4%, 0.9%, 0.8%, 0.75%, 0.68%, 0.5%. 0.44%, 0.3%, 0.25%, 0.2%, 0.1%, 0.08%, 0.075%, 0.058%, 0.04%. 0.032%, 0.025%, 0.01%, etc.) and any range of O₂ saturation levels between 0-9%, inclusive (e.g., 0-5%, 0.05-0.1%, 0.1-0.2%, 0.1-0.5%, 0.5-2.0%, 0-8%, 5-7%, 0.3-4.2% O₂, etc.). The exemplary fractions and ranges listed here are for illustrative purposes and not meant to be limiting in any way.

TABLE 1B

| Compartment | Oxygen Tension |
|---|---|
| stomach | ~60 torr (e.g., 58 +/− 15 torr) |
| duodenum and first part of | ~30 torr (e.g., 32 +/− 8 torr); ~20% |
| jejunum | oxygen in ambient air |
| Ileum (mid- small intestine) | ~10 torr; ~6% oxygen in ambient |
| | air (e.g., 11 +/− 3 torr) |
| Distal sigmoid colon | ~3 torr (e.g., 3 +/− 1 torr) |
| colon | <2 torr |
| Lumen of cecum | <1 torr |
| tumor | <32 torr (most tumors are <15 torr) |

[0103] “Microorganism” refers to an organism or microbe of microscopic, submicroscopic, or ultramicroscopic size that typically consists of a single cell. Examples of microorganisms include bacteria, viruses, parasites, fungi, certain algae, yeast, e.g., Saccharomyces, and protozoa. In some aspects, the microorganism is engineered (“engineered microorganism”) to produce one or more therapeutic molecules, e.g., an antiinflammatory or barrier enhancer molecule. In certain embodiments, the engineered microorganism is an engineered bacterium.

[0104] “Non-pathogenic bacteria” refer to bacteria that are not capable of causing disease or harmful responses in a host. In some embodiments, non-pathogenic bacteria are Gram-negative bacteria. In some embodiments, non-pathogenic bacteria are Gram-positive bacteria. In some embodiments, non-pathogenic bacteria do not contain lipopolysaccharides (LPS). In some embodiments, non-pathogenic bacteria are commensal bacteria. Examples of non-pathogenic bacteria include, but are not limited to certain strains belonging to the genus Bacillus, Bacteroides, Bifidobacterium, Brevibacteria, Clostridium, Enterococcus, Escherichia coli, Lactobacillus, Lactococcus, Saccharomyces, and Staphylococcus, e.g., Bacillus coagulans, Bacillus subtilis, Bacteroides fragilis, Bacteroides subtilis, Bacteroides thetaiotaomicron, Bifidobacterium bifidum, Bifidobacterium infantis, Bifidobacterium lactis, Bifidobacterium longum, Clostridium butyricum, Enterococcus faecium, Escherichia coli, Escherichia coli Nissle, Lactobacillus acidophilus, Lactobacillus bulgaricus, Lactobacillus casei, Lactobacillus johnsonii, Lactobacillus paracasei, Lactobacillus plantarum, Lactobacillus reuteri, Lactobacillus rhamnosus, Lactococcus lactis and Saccharomyces boulardii (Sonnenborn et al., 2009; Dinleyici et al., 2014; U.S. Pat. Nos. 6,835,376; 6,203,797; 5,589,168; 7,731,976). Non-pathogenic bacteria also include commensal bacteria, which are present in the indigenous microbiota of the gut. In one embodiment, the disclosure further includes non-pathogenic Saccharomyces, such as Saccharomyces boulardii. Naturally pathogenic bacteria may be genetically engineered to reduce or eliminate pathogenicity.

[0105] “Probiotic” is used to refer to live, non-pathogenic microorganisms, e.g., bacteria, which can confer health benefits to a host organism that contains an appropriate amount of the microorganism. In some embodiments, the host organism is a mammal. In some embodiments, the host organism is a human. In some embodiments, the probiotic bacteria are Gram-negative bacteria. In some embodiments, the probiotic bacteria are Gram-positive bacteria. Some species, strains, and/or subtypes of non-pathogenic bacteria are currently recognized as probiotic bacteria. Examples of probiotic bacteria include, but are not limited to, certain strains belonging to the genus Bifidobacteria, Escherichia Coli, Lactobacillus, and Saccharomyces e.g., Bifidobacterium bifidum, Enterococcus faecium, Escherichia coli strain Nissle, Lactobacillus acidophilus, Lactobacillus bulgaricus, Lactobacillus paracasei, and Lactobacillus plantarum, and Saccharomyces boulardii (Dinleyici et al., 2014; U.S. Pat. Nos. 5,589,168; 6,203,797; 6,835,376).

[0106] The probiotic may be a variant or a mutant strain of bacterium (Arthur et al., 2012; Cuevas-Ramos et al., 2010; Olier et al., 2012; Nougayrede et al., 2006). Non-pathogenic bacteria may be genetically engineered to enhance or improve desired biological properties, e.g., survivability. Non-pathogenic bacteria may be genetically engineered to provide probiotic properties. Probiotic bacteria may be genetically engineered to enhance or improve probiotic properties.

[0107] As used herein, the term “auxotroph” or “auxotrophic” refers to an organism that requires a specific factor, e.g., an amino acid, a sugar, or other nutrient) to support its growth. An “auxotrophic modification” is a genetic modification that causes the organism to die in the absence of an exogenously added nutrient essential for survival or growth because it is unable to produce said nutrient. As used herein, the term “essential gene” refers to a gene which is necessary to for cell growth and/or survival. Essential genes are described in more detail infra and include, but are not limited to, DNA synthesis genes (such as thyA), cell wall synthesis genes (such as dapA), and amino acid genes (such as serA and metA).

[0108] As used herein, the term “modulate” and its cognates means to alter, regulate, or adjust positively or negatively a molecular or physiological readout, outcome, or process, to effect a change in said readout, outcome, or process as compared to a normal, average, wild-type, or baseline measurement. Thus, for example, “modulate” or “modulation” includes up-regulation and down-regulation. A non-limiting example of modulating a readout, outcome, or process is effecting a change or alteration in the normal or baseline functioning, activity, expression, or secretion of a biomolecule (e.g. a protein, enzyme, cytokine, growth factor, hormone, metabolite, short chain fatty acid, or other compound). Another non-limiting example of modulating a readout, outcome, or process is effecting a change in the amount or level of a biomolecule of interest, e.g. in the serum and/or the gut lumen. In another non-limiting example, modulating a readout, outcome, or process relates to a phenotypic change or alteration in one or more disease symptoms. Thus, “modulate” is used to refer to an increase, decrease, masking, altering, overriding or restoring the normal functioning, activity, or levels of a readout, outcome or process (e.g, biomolecule of interest, and/or molecular or physiological process, and/or a phenotypic change in one or more disease symptoms).

[0109] As used herein, the terms “modulate” and “treat” a disease and their cognates refer to an amelioration of a disease, disorder, and/or condition, or at least one discernible symptom thereof. In another embodiment, “modulate” and “treat” refer to an amelioration of at least one measurable physical parameter, not necessarily discernible by the patient. In another embodiment, “modulate” and “treat” refer to inhibiting the progression of a disease, disorder, and/or condition, either physically (e.g., stabilization of a discernible symptom), physiologically (e.g., stabilization of a physical parameter), or both. In another embodiment, “modulate” and “treat” refer to slowing the progression or reversing the progression of a disease, disorder, and/or condition. As used herein, “prevent” and its cognates refer to delaying the onset or reducing the risk of acquiring a given disease, disorder and/or condition or a symptom associated with such disease, disorder, and/or condition.

[0110] Those in need of treatment may include individuals already having a particular medical disorder, as well as those at risk of having, or who may ultimately acquire the disorder. The need for treatment is assessed, for example, by the presence of one or more risk factors associated with the development of a disorder, the presence or progression of a disorder, or likely receptiveness to treatment of a subject having the disorder. Treating autoimmune disorders and/or diseases and conditions associated with gut inflammation and/or compromised gut barrier function may encompass reducing or eliminating excess inflammation and/or associated symptoms, and does not necessarily encompass the elimination of the underlying disease. Treating the diseases described herein may encompass increasing levels of butyrate, increasing levels of acetate, increasing levels of butyrate and increasing GLP-2, IL-22, and/or IL-10, and/or modulating levels of tryptophan and/or its metabolites (e.g., kynurenine), and/or providing any other effector molecule and does not necessarily encompass the elimination of the underlying disease.

[0111] Those in need of treatment may include individuals already having a particular cancer, as well as those at risk of having, or who may ultimately acquire the cancer. The need for treatment is assessed, for example, by the presence of one or more risk factors associated with the development of a cancer (e.g., alcohol use, tobacco use, obesity, excessive exposure to ultraviolet radiation, high levels of estrogen, family history, genetic susceptibility), the presence or progression of a cancer, or likely receptiveness to treatment of a subject having the cancer. Cancer is caused by genomic instability and high mutation rates within affected cells. Treating cancer may encompass eliminating symptoms associated with the cancer and/or modulating the growth and/or volume of a subject's tumor, and does not necessarily encompass the elimination of the underlying cause of the cancer, e.g., an underlying genetic predisposition.

[0112] “Cancer” or “cancerous” is used to refer to a physiological condition that is characterized by unregulated cell growth. In some embodiments, cancer refers to a tumor. “Tumor” is used to refer to any neoplastic cell growth or proliferation or any pre-cancerous or cancerous cell or tissue. A tumor may be malignant or benign. Side effects of cancer treatment may include, but are not limited to, opportunistic autoimmune disorder(s), systemic toxicity, anemia, loss of appetite, irritation of bladder lining, bleeding and bruising (thrombocytopenia), changes in taste or smell, constipation, diarrhea, dry mouth, dysphagia, edema, fatigue, hair loss (alopecia), infection, infertility, lymphedema, mouth sores, nausea, pain, peripheral neuropathy, tooth decay, urinary tract infections, and/or problems with memory and concentration (National Cancer Institute). Those in need of treatment may include individuals already having a particular cancer, as well as those at risk of having, or who may ultimately acquire an autoimmune disorder.

[0113] As used herein, “diseases and conditions associated with gut inflammation and/or compromised gut barrier function” include, but are not limited to, inflammatory bowel diseases, diarrheal diseases, and related diseases. “Inflammatory bowel diseases” and “IBD” are used interchangeably herein to refer to a group of diseases associated with gut inflammation, which include, but are not limited to, Crohn's disease, ulcerative colitis, collagenous colitis, lymphocytic colitis, diversion colitis, Behcet's disease, and indeterminate colitis. As used herein, “diarrheal diseases” include, but are not limited to, acute watery diarrhea, e.g., cholera; acute bloody diarrhea, e.g., dysentery; and persistent diarrhea. As used herein, related diseases include, but are not limited to, short bowel syndrome, ulcerative proctitis, proctosigmoiditis, left-sided colitis, pancolitis, and fulminant colitis.

[0114] Symptoms associated with the aforementioned diseases and conditions include, but are not limited to, one or more of diarrhea, bloody stool, mouth sores, perianal disease, abdominal pain, abdominal cramping, fever, fatigue, weight loss, iron deficiency, anemia, appetite loss, weight loss, anorexia, delayed growth, delayed pubertal development, inflammation of the skin, inflammation of the eyes, inflammation of the joints, inflammation of the liver, and inflammation of the bile ducts.

[0115] As used herein, “metabolic diseases” include, but are not limited to, type 1 diabetes; type 2 diabetes; metabolic syndrome; Bardet-Biedel syndrome; Prader-Willi syndrome; non-alcoholic fatty liver disease; tuberous sclerosis; Albright hereditary osteodystrophy; brain-derived neurotrophic factor (BDNF) deficiency; Single-minded 1 (SIM1) deficiency; leptin deficiency; leptin receptor deficiency; pro-opiomelanocortin (POMC) defects; proprotein convertase subtilisin/kexin type 1 (PCSK1) deficiency; Src homology 2B1 (SH2B1) deficiency; pro-hormone convertase 1/3 deficiency; melanocortin-4-receptor (MC4R) deficiency; Wilms tumor, aniridia, genitourinary anomalies, and mental retardation (WAGR) syndrome; pseudohypoparathyroidism type 1A; Fragile X syndrome; Borjeson-Forsmann-Lehmann syndrome; Alstrom syndrome; Cohen syndrome; and ulnar-mammary syndrome.

[0116] Symptoms associated with the aforementioned diseases and conditions include, but are not limited to, one or more of weight gain, obesity, fatigue, hyperlipidemia, hyperphagia, hyperdipsia, polyphagia, polydipsia, polyuria, pain of the extremities, numbness of the extremities, blurry vision, nystagmus, hearing loss, cardiomyopathy, insulin resistance, light sensitivity, pulmonary disease, liver disease, liver cirrhosis, liver failure, kidney disease, kidney failure, seizures, hypogonadism, and infertility.

[0117] As used herein a “pharmaceutical composition” refers to a preparation of genetically engineered microorganism of the disclosure, e.g., recombinant bacteria, with other components such as a physiologically suitable carrier and/or excipient.

[0118] The phrases “physiologically acceptable carrier” and “pharmaceutically acceptable carrier” which may be used interchangeably refer to a carrier or a diluent that does not cause significant irritation to an organism and does not abrogate the biological activity and properties of the administered bacterial or viral compound. An adjuvant is included under these phrases.

[0119] The term “excipient” refers to an inert substance added to a pharmaceutical composition to further facilitate administration of an active ingredient. Examples include, but are not limited to, calcium bicarbonate, sodium bicarbonate calcium phosphate, various sugars and types of starch, cellulose derivatives, gelatin, vegetable oils, polyethylene glycols, and surfactants, including, for example, polysorbate 20.

[0120] The terms “therapeutically effective dose” and “therapeutically effective amount” are used to refer to an amount of a compound that results in prevention, delay of onset of symptoms, or amelioration of symptoms of a condition, e.g., inflammation, diarrhea.an autoimmune disorder. A therapeutically effective amount may, for example, be sufficient to treat, prevent, reduce the severity, delay the onset, and/or reduce the risk of occurrence of one or more symptoms of an autoimmune a disorder and/or a disease or condition as described herein. A therapeutically effective amount, as well as a therapeutically effective frequency of administration, can be determined by methods known in the art and discussed below.

[0121] As used herein, the term “bacteriostatic” or “cytostatic” refers to a molecule or protein which is capable of arresting, retarding, or inhibiting the growth, division, multiplication or replication of recombinant bacterial cell of the disclosure.

[0122] As used herein, the term “bactericidal” refers to a molecule or protein which is capable of killing the recombinant bacterial cell of the disclosure.

[0123] As used herein, the term “toxin” refers to a protein, enzyme, or polypeptide fragment thereof, or other molecule which is capable of arresting, retarding, or inhibiting the growth, division, multiplication or replication of the recombinant bacterial cell of the disclosure, or which is capable of killing the recombinant bacterial cell of the disclosure. The term “toxin” is intended to include bacteriostatic proteins and bactericidal proteins. The term “toxin” is intended to include, but not limited to, lytic proteins, bacteriocins (e.g., microcins and colicins), gyrase inhibitors, polymerase inhibitors, transcription inhibitors, translation inhibitors, DNases, and RNases. The term “anti-toxin” or “antitoxin,” as used herein, refers to a protein or enzyme which is capable of inhibiting the activity of a toxin. The term anti-toxin is intended to include, but not limited to, immunity modulators, and inhibitors of toxin expression. Examples of toxins and antitoxins are known in the art and described in more detail infra.

[0124] As used herein, “payload” refers to one or more molecules of interest to be produced by a genetically engineered microorganism, such as a bacteria or a virus. In some embodiments, the payload is a therapeutic payload, e.g. an effector molecule, e.g. butyrate, acetate, propionate, GLP-2, IL-10, IL-22, IL-2, other interleukins, and/or tryptophan and/or one or more of its metabolites, as described herein. In some embodiments, the payload is a regulatory molecule, e.g., a transcriptional regulator such as FNR. In some embodiments, the payload comprises a regulatory element, such as a promoter or a repressor. In some embodiments, the payload comprises an inducible promoter, such as from FNRS. In some embodiments, the payload comprises a repressor element, such as a kill switch. In some embodiments, the payload comprises an antibiotic resistance gene or genes. In some embodiments, the payload is encoded by a gene, multiple genes, gene cassette, or an operon. In alternate embodiments, the payload is produced by a biosynthetic or biochemical pathway, wherein the biosynthetic or biochemical pathway may optionally be endogenous to the microorganism. In alternate embodiments, the payload is produced by a biosynthetic or biochemical pathway, wherein the biosynthetic or biochemical pathway is not endogenous to the microorganism. In some embodiments, the genetically engineered microorganism comprises two or more payloads.

[0125] As used herein, the term “conventional treatment” or “conventional therapy” refers to treatment or therapy that is currently accepted, considered current standard of care, and/or used by most healthcare professionals for treating a disease or disorder, e.g., cancer, autoimmune disorders, metabolic diseases, diseases relating to inborn errors of metabolism, neurological or neurodegenerative diseases, or diseases associated with inflammation and/or reduced gut barrier function. It is different from alternative or complementary therapies, which are not as widely used.

[0126] As used herein, the term “polypeptide” includes “polypeptide” as well as “polypeptides,” and refers to a molecule composed of amino acid monomers linearly linked by amide bonds (i.e., peptide bonds). The term “polypeptide” refers to any chain or chains of two or more amino acids, and does not refer to a specific length of the product. Thus, “peptides,” “dipeptides,” “tripeptides, “oligopeptides,” “protein,” “amino acid chain,” or any other term used to refer to a chain or chains of two or more amino acids, are included within the definition of “polypeptide,” and the term “polypeptide” may be used instead of, or interchangeably with any of these terms. The term “polypeptide” is also intended to refer to the products of post-expression modifications of the polypeptide, including but not limited to glycosylation, acetylation, phosphorylation, amidation, derivatization, proteolytic cleavage, or modification by non-naturally occurring amino acids. A polypeptide may be derived from a natural biological source or produced by recombinant technology. In other embodiments, the polypeptide is produced by the recombinant bacteria of the current disclosure. A polypeptide may be of a size of about 3 or more, 5 or more, 10 or more, 20 or more, 25 or more, 50 or more, 75 or more, 100 or more, 200 or more, 500 or more, 1,000 or more, or 2,000 or more amino acids. Polypeptides may have a defined three-dimensional structure, although they do not necessarily have such structure. Polypeptides with a defined three-dimensional structure are referred to as folded, and polypeptides, which do not possess a defined three-dimensional structure, but rather can adopt a large number of different conformations, are referred to as unfolded. The term “peptide” or “polypeptide” may refer to an amino acid sequence that corresponds to a protein or a portion of a protein or may refer to an amino acid sequence that corresponds with non-protein sequence, e.g., a sequence selected from a regulatory peptide sequence, leader peptide sequence, signal peptide sequence, linker peptide sequence, and other peptide sequence.

[0127] An “isolated” polypeptide or a fragment, variant, or derivative thereof refers to a polypeptide that is not in its natural milieu. No particular level of purification is required. Recombinantly produced polypeptides and proteins expressed in host cells, including but not limited to bacterial or mammalian cells, are considered isolated for purposed of the invention, as are native or recombinant polypeptides which have been separated, fractionated, or partially or substantially purified by any suitable technique. Recombinant peptides, polypeptides or proteins refer to peptides, polypeptides or proteins produced by recombinant DNA techniques, i.e. produced from cells, microbial or mammalian, transformed by an exogenous recombinant DNA expression construct encoding the polypeptide. Proteins or peptides expressed in most bacterial cultures will typically be free of glycan. Fragments, derivatives, analogs or variants of the foregoing polypeptides, and any combination thereof are also included as polypeptides. The terms “fragment,” “variant,” “derivative” and “analog” include polypeptides having an amino acid sequence sufficiently similar to the amino acid sequence of the original peptide and include any polypeptides, which retain at least one or more properties of the corresponding original polypeptide. Fragments of polypeptides include proteolytic fragments, as well as deletion fragments. Fragments also include specific antibody or bioactive fragments or immunologically active fragments derived from any polypeptides described herein. Variants may occur naturally or be non-naturally occurring. Non-naturally occurring variants may be produced using mutagenesis methods known in the art. Variant polypeptides may comprise conservative or non-conservative amino acid substitutions, deletions or additions.

[0128] Polypeptides also include fusion proteins. As used herein, the term “variant” includes a fusion protein, which comprises a sequence of the original peptide or sufficiently similar to the original peptide. As used herein, the term “fusion protein” refers to a chimeric protein comprising amino acid sequences of two or more different proteins. Typically, fusion proteins result from well known in vitro recombination techniques. Fusion proteins may have a similar structural function (but not necessarily to the same extent), and/or similar regulatory function (but not necessarily to the same extent), and/or similar biochemical function (but not necessarily to the same extent) and/or immunological activity (but not necessarily to the same extent) as the individual original proteins which are the components of the fusion proteins. “Derivatives” include but are not limited to peptides, which contain one or more naturally occurring amino acid derivatives of the twenty standard amino acids. “Similarity” between two peptides is determined by comparing the amino acid sequence of one peptide to the sequence of a second peptide. An amino acid of one peptide is similar to the corresponding amino acid of a second peptide if it is identical or a conservative amino acid substitution. Conservative substitutions include those described in Dayhoff, M. O., ed., The Atlas of Protein Sequence and Structure 5, National Biomedical Research Foundation, Washington, D.C. (1978), and in Argos, EMBO J. 8 (1989), 779-785. For example, amino acids belonging to one of the following groups represent conservative changes or substitutions: -Ala, Pro, Gly, Gln, Asn, Ser, Thr; -Cys, Ser, Tyr, Thr; -Val, Ile, Leu, Met, Ala, Phe; -Lys, Arg, His; -Phe, Tyr, Trp, His; and -Asp, Glu.

[0129] In some embodiments of the disclosure, the recombinant bacteria comprise one or more gene sequence(s) encoding one or more fusion proteins. In some embodiments, the recombinant bacteria express a fusion protein, in which a secretion tag polypeptide is fused to an effector polypeptide, i.e., the secretion tag is linked to the polypeptide through a peptide bond or a linker. In some embodiments, the recombinant bacteria express an effector polypeptide which is fused to a stabilizing polypeptide. As used herein “stabilizing polypeptide” extends the half-life of the effector polypeptide to which it is fused. Non-limiting examples of fusion proteins containing such stabilizing polypeptides include Fc fusion proteins, transferrin fusion proteins, and albumin fusion proteins (Strohl, BioDrugs. 2015; 29(4): 215-239). In some embodiments, the effector polypeptide is fused to an inert polypeptide to extend the half-life. A non-limiting example of such a polypeptide is XTEN (Schellenberger V, et al. Nat Biotechnol. 2009; 27:1186-1190). Another non-limiting example of a half-life extending polypeptide is CTP. CTP naturally extends protein's half-life in human serum, likely because the negatively charged, heavily sialylated CTP impairs renal clearance. Another non-limiting example of a polypeptide which can be fused to an effector to extend half-life is ELPs, which are repeating peptide units containing sequences commonly found in elastin (repeats of V-P-G-x-G, where x is any amino acid except proline (SEQ ID NO: 1057) (Strohl et al.). Another non-limiting examples of a polypeptide containing a polypeptide repeat sequence which can be fused to an effector are PAS (polymer using three repeating amino acids, proline, alanine and serine) and HAP (glycine-rich HAP). Finally, gelatin-like protein (GLK) polymer has also been used to extend effector half-life (Strohl, 2015).

[0130] An antibody generally refers to a polypeptide of the immunoglobulin family or a polypeptide comprising fragments of an immunoglobulin that is capable of noncovalently, reversibly, and in a specific manner binding a corresponding antigen. An exemplary antibody structural unit comprises a tetramer. Each tetramer is composed of two identical pairs of polypeptide chains, each pair having one “light” (about 25 kD) and one “heavy” chain (about 50-70 kD), connected through a disulfide bond. The recognized immunoglobulin genes include the κ, λ, γ, δ, ε, and μ constant region genes, as well as the myriad immunoglobulin variable region genes. Light chains are classified as either κ or λ. Heavy chains are classified as γ, μ, α, δ, or ε, which in turn define the immunoglobulin classes, IgG, IgM, IgA, IgD, and IgE, respectively. The N-terminus of each chain defines a variable region of about 100 to 110 or more amino acids primarily responsible for antigen recognition. The terms variable light chain (VL) and variable heavy chain (VH) refer to these regions of light and heavy chains respectively.

[0131] As used herein, the term “antibody” or “antibodies” is meant to encompasses all variations of antibody and fragments thereof that possess one or more particular binding specificities. Thus, the term “antibody” or “antibodies” is meant to include full length antibodies, chimeric antibodies, humanized antibodies, single chain antibodies (ScFv, camelids), Fab, Fab′, multimeric versions of these fragments (e.g., F(ab′)2), single domain antibodies (sdAB, VHH fragments), heavy chain antibodies (HCAb), nanobodies, diabodies, and minibodies. Antibodies can have more than one binding specificity, e.g., be bispecific. The term “antibody” is also meant to include so-called antibody mimetics. Antibody mimetics refers to small molecules, e.g., 3-30 kDa, which can be single amino acid chain molecules, which can specifically bind antigens but do not have an antibody-related structure. Antibody mimetics, include, but are not limited to, Affibody molecules (Z domain of Protein A), Affilins (Gamma-B crystalline), Ubiquitin, Affimers (Cystatin), Affitins (Sac7d (from Sulfolobus acidocaldarius), Alphabodies (Triple helix coiled coil), Anticalins (Lipocalins), Avimers (domains of various membrane receptors), DARPins (Ankyrin repeat motif), Fynomers (SH3 domain of Fyn), Kunitz domain peptides Kunitz domains of various protease inhibitors), Ecallantide (Kalbitor), and Monobodies. In certain aspects, the term “antibody” or “antibodies” is meant to refer to a single chain antibody(ies), single domain antibody(ies), and camelid antibody(ies). Utility of antibodies in the treatment of cancer and additional anti-cancer antibodies can for example be found in Scott et al., Antibody Therapy for Cancer, Nature Reviews Cancer April 2012 Volume 12, incorporated by reference in its entirety.

[0132] A “single-chain antibody” or “single-chain antibodies” typically refers to a peptide comprising a heavy chain of an immunoglobulin, a light chain of an immunoglobulin, and optionally a linker or bond, such as a disulfide bond. The single-chain antibody lacks the constant Fc region found in traditional antibodies. In some embodiments, the single-chain antibody is a naturally occurring single-chain antibody, e.g., a camelid antibody. In some embodiments, the single-chain antibody is a synthetic, engineered, or modified single-chain antibody. In some embodiments, the single-chain antibody is capable of retaining substantially the same antigen specificity as compared to the original immunoglobulin despite the addition of a linker and the removal of the constant regions. In some aspects, the single chain antibody can be a “scFv antibody”, which refers to a fusion protein of the variable regions of the heavy (VH) and light chains (VL) of immunoglobulins (without any constant regions), optionally connected with a short linker peptide of ten to about 25 amino acids, as described, for example, in U.S. Pat. No. 4,946,778, the contents of which is herein incorporated by reference in its entirety. The Fv fragment is the smallest fragment that holds a binding site of an antibody, which binding site may, in some aspects, maintain the specificity of the original antibody. Techniques for the production of single chain antibodies are described in U.S. Pat. No. 4,946,778. The Vh and VL sequences of the scFv can be connected via the N-terminus of the VH connecting to the C-terminus of the VL or via the C-terminus of the VH connecting to the N-terminus of the VL. ScFv fragments are independent folding entities that can be fused indistinctively on either end to other epitope tags or protein domains. Linkers of varying length can be used to link the Vh and VL sequences, which the linkers can be glycine rich (provides flexibility) and serine or threonine rich (increases solubility). Short linkers may prevent association of the two domains and can result in multimers (diabodies, tribodies, etc.). Long linkers may result in proteolysis or weak domain association (described in Voelkel et al el., 2011). Linkers of length between 15 and 20 amino acids or 18 and 20 amino acids are most often used. Additional non-limiting examples of linkers, including other flexible linkers are described in Chen et al., 2013 (Adv Drug Deliv Rev. 2013; 65(10): 1357-1369.), the contents of which is herein incorporated by reference in its entirety. Flexible linkers are also rich in small or polar amino acids such as Glycine and Serine, but can contain additional amino acids such as Threonine and Alanine to maintain flexibility, as well as polar amino acids such as Lysine and Glutamate to improve solubility. Exemplary linkers include, but are not limited to, (Gly-Gly-Gly-Gly-Ser)n (SEQ ID NO: 1058), KESGSVSSEQLAQFRSLD (SEQ ID NO: 1059) and EGKSSGSGSESKST (SEQ ID NO: 1060), (Gly)8 (SEQ ID NO: 1061), and Gly and Ser rich flexible linker, GSAGSAAGSGEF (SEQ ID NO: 1062).

[0133] “Single chain antibodies” as used herein also include single-domain antibodies, which include camelid antibodies and other heavy chain antibodies, light chain antibodies, including nanobodies and single domains VH or VL domains derived from human, mouse or other species. Single domain antibodies may be derived from any species including, but not limited to mouse, human, camel, llama, fish, shark, goat, rabbit, and bovine. Single domain antibodies include domain antigen-binding units which have a camelid scaffold, derived from camels, llamas, or alpacas. Camelids produce functional antibodies devoid of light chains. The heavy chain variable (VH) domain folds autonomously and functions independently as an antigen-binding unit. Its binding surface involves only three CDRs as compared to the six CDRs in classical antigen-binding molecules (Fabs) or single chain variable fragments (scFvs). Camelid antibodies are capable of attaining binding affinities comparable to those of conventional antibodies. Camelid scaffold-based antibodies can be produced using methods well known in the art. Cartilaginous fishes also have heavy-chain antibodies (IgNAR, ‘immunoglobulin new antigen receptor’), from which single-domain antibodies called VNAR fragments can be obtained. Alternatively, the dimeric variable domains from IgG from humans or mice can be split into monomers. Nanobodies are single chain antibodies derived from light chains. The term “single chain antibody” also refers to antibody mimetics.

[0134] In some embodiments, the antibodies expressed by the engineered microorganisms are bispecific. In certain embodiments, a bispecific antibody molecule comprises a scFv, or fragment thereof, have binding specificity for a first epitope and a scFv, or fragment thereof, have binding specificity for a second epitope. Antigen-binding fragments or antibody portions include bivalent scFv (diabody), bispecific scFv antibodies where the antibody molecule recognizes two different epitopes, single binding domains (dAbs), and minibodies. Monomeric single-chain diabodies (scDb) are readily assembled in bacterial and mammalian cells and show improved stability under physiological conditions (Voelkel et al., 2001 and references therein; Protein Eng. (2001) 14 (10): 815-823).

[0135] As used herein, the term “sufficiently similar” means a first amino acid sequence that contains a sufficient or minimum number of identical or equivalent amino acid residues relative to a second amino acid sequence such that the first and second amino acid sequences have a common structural domain and/or common functional activity. For example, amino acid sequences that comprise a common structural domain that is at least about 45%, 50%, 55%, 60%, 65%, 70%, 75%, 80%, 85%, 90%, 91%, 92%, 93%, 94%, 95%, 96%, 97%, 98%, 99%, or 100%, identical are defined herein as sufficiently similar. Preferably, variants will be sufficiently similar to the amino acid sequence of the peptides of the disclosure. Such variants generally retain the functional activity of the peptides of the present disclosure. Variants include peptides that differ in amino acid sequence from the native and wt peptide, respectively, by way of one or more amino acid deletion(s), addition(s), and/or substitution(s). These may be naturally occurring variants as well as artificially designed ones.

[0136] As used herein the term “linker”, “linker peptide” or “peptide linkers” or “linker” refers to synthetic or non-native or non-naturally-occurring amino acid sequences that connect or link two polypeptide sequences, e.g., that link two polypeptide domains. As used herein the term “synthetic” refers to amino acid sequences that are not naturally occurring. Exemplary linkers are described herein. Additional exemplary linkers are provided in US 20140079701 and in Chen et al, Adv Drug Deliv Rev. 2013; 65(10): 1357-1369, the contents of which are herein incorporated by reference in its entirety. Table 2 depicts non-limiting examples of linkers known in the art.

TABLE 2
Linkers

SEQ ID NO:

Increase Stability/Folding

| | | | |
|---|---|---|---|
| scFv + DB2:D24 | 1063 | (GGGGS)3 | 1063 |
| G-CSF-Tf | 1063 | (GGGGS)3 | 1063 |
| HBsAg preS1 | 1063 | (GGGGS)3 | 1063 |
| Myc- Est2p | 1061 | (Gly)8 | 1061 |
| albumin-ANF | 1064 | (Gly)6 | 1064 |
| virus coat | 1065 | (EAAAK)3 | 1065 |
| protein | | | |
| beta-glucanase- | 1066 | (EAAAK)n (n = 1-3) | 1066 |
| xylanase | | | |

Increase expression

| | | | |
|---|---|---|---|
| hGH-Tf and | 1067 | A(EAAAK)4ALEA(EAAAK)4A | 1067 |
| Tf-hGH | | | |
| G-CSF-Tf and | 1067 | A(EAAAK)4ALEA(EAAAK)4A | 1067 |
| Tf-G-CSF | rigid | | |

Improve biological activty

| | | | |
|---|---|---|---|
| G-CSF-Tf | 1063 | (GGGGS)3 | 1063 |
| G-CSF-Tf | 1067 | A(EAAAK)4ALEA(EAAAK)4A | 1067 |
| hGH-Tf | 1067 | A(EAAAK)4ALEA(EAAAK)4A | 1067 |
| HSA-IFN-α2b | 1058 | GGGGS | |
| HSA-IFN-α2b | 1068 | PAPAP | 1068 |
| HSA-IFN-α2b | 1069 | AEAAAKEAAAKA | 1069 |
| PGA-rTHS | 1070 | (GGGGS)n (n = 1, 2, 4) | 1070 |
| interferon-γ- | 1071 | (Ala-Pro)n (10-34 aa) | 1071 |
| gp120 | | | |
| GSF-S-S-Tf | | disulfide | |
| IFN-α2b-HSA | | disulfide | |

Enable targeting

| | | | |
|---|---|---|---|
| FIX-albumin | 1072 | VSQTSKLTR↓AETVFPDV | 1072 |
| LAP-IFN-β | 1073 | PLG↓LWA | 1073 |
| MazE-MazF | 1074; 1075 | RVL↓AEA; EDVVCC↓SMSY; | 1074; 1075 |
| | | GGIEGR↓GSC | 1076 |
| Immunotoxins | cleavable | TRHRQPR↓GWE; | 1077 |
| | cleavable | AGNRVRR↓SVG; | 1078 |
| | cleavable | RRRRRRR↓R↓R | 1079 |
| Immunotoxin | cleavable | GFLG↓ | 1080 |

Alter PK

| | | | |
|---|---|---|---|
| G-CSF-Tf and | dipeptide | LE | |
| hGH-Tf | rigid | A(EAAAK)4ALEA(EAAAK)4A | 1067 |
| | cleavable | Disulfide | |

[0137] As used herein the term “codon-optimized” refers to the modification of codons in the gene or coding regions of a nucleic acid molecule to reflect the typical codon usage of the host organism without altering the polypeptide encoded by the nucleic acid molecule. Such optimization includes replacing at least one, or more than one, or a significant number, of codons with one or more codons that are more frequently used in the genes of the host organism. A “codon-optimized sequence” refers to a sequence, which was modified from an existing coding sequence, or designed, for example, to improve translation in an expression host cell or organism of a transcript RNA molecule transcribed from the coding sequence, or to improve transcription of a coding sequence. Codon optimization includes, but is not limited to, processes including selecting codons for the coding sequence to suit the codon preference of the expression host organism. Many organisms display a bias or preference for use of particular codons to code for insertion of a particular amino acid in a growing polypeptide chain. Codon preference or codon bias, differences in codon usage between organisms, is allowed by the degeneracy of the genetic code, and is well documented among many organisms. Codon bias often correlates with the efficiency of translation of messenger RNA (mRNA), which is in turn believed to be dependent on, inter alia, the properties of the codons being translated and the availability of particular transfer RNA (tRNA) molecules. The predominance of selected tRNAs in a cell is generally a reflection of the codons used most frequently in peptide synthesis. Accordingly, genes can be tailored for optimal gene expression in a given organism based on codon optimization.

[0138] As used herein, the terms “secretion system” or “secretion protein” refers to a native or non-native secretion mechanism capable of secreting or exporting a biomolecule, e.g., polypeptide from the microbial, e.g., bacterial cytoplasm. The secretion system may comprise a single protein or may comprise two or more proteins assembled in a complex e.g., HlyBD. Non-limiting examples of secretion systems for gram negative bacteria include the modified type III flagellar, type I (e.g., hemolysin secretion system), type II, type IV, type V, type VI, and type VII secretion systems, resistance-nodulation-division (RND) multi-drug efflux pumps, and various single membrane secretion systems. Non-liming examples of secretion systems for gram positive bacteria include Sec and TAT secretion systems. In some embodiments, the polypeptide to be secreted include a “secretion tag” of either RNA or peptide origin to direct the polypeptide to specific secretion systems. In some embodiments, the secretion system is able to remove this tag before secreting the polypeptide from the engineered bacteria. For example, in Type V auto-secretion-mediated secretion the N-terminal peptide secretion tag is removed upon translocation of the “passenger” peptide from the cytoplasm into the periplasmic compartment by the native Sec system. Further, once the auto-secretor is translocated across the outer membrane the C-terminal secretion tag can be removed by either an autocatalytic or protease-catalyzed e.g., OmpT cleavage thereby releasing the antinflammatory or barrier enhancer molecule(s) into the extracellular milieu. In some embodiments, the secretion system involves the generation of a “leaky” or de-stabilized outer membrane, which may be accomplished by deleting or mutagenizing genes responsible for tethering the outer membrane to the rigid peptidoglycan skeleton, including for example, lpp, ompC, ompA, ompF, tolA, tolB, pal, degS, degP, and nlpl. Lpp functions as the primary ‘staple’ of the bacterial cell wall to the peptidoglycan. TolA-PAL and OmpA complexes function similarly to Lpp and are other deletion targets to generate a leaky phenotype. Additionally, leaky phenotypes have been observed when periplasmic proteases, such as degS, degP or nlpl, are deactivated. Thus, in some embodiments, the engineered bacteria have one or more deleted or mutated membrane genes, e.g., selected from lpp, ompA, ompA, ompF, tolA, tolB, and pal genes. In some embodiments, the engineered bacteria have one or more deleted or mutated periplasmic protease genes, e.g., selected from degS, degP, and nlpl. In some embodiments, the engineered bacteria have one or more deleted or mutated gene(s), selected from lpp, ompA, ompA, ompF, tolA, tolB, pal, degS, degP, and nlpl genes.

[0139] The articles “a” and “an,” as used herein, should be understood to mean “at least one,” unless clearly indicated to the contrary.

[0140] The phrase “and/or,” when used between elements in a list, is intended to mean either (1) that only a single listed element is present, or (2) that more than one element of the list is present. For example, “A, B, and/or C” indicates that the selection may be A alone; B alone; C alone; A and B; A and C; B and C; or A, B, and C. The phrase “and/or” may be used interchangeably with “at least one of” or “one or more of” the elements in a list.

[0141] Ranges provided herein are understood to be shorthand for all of the values within the range. For example, a range of 1 to 50 is understood to include any number, combination of numbers, or sub-range from the group consisting 1, 2, 3, 4, 5, 6, 7, 8, 9, 10, 11, 12, 13, 14, 15, 16, 17, 18, 19, 20, 21, 22, 23, 24, 25, 26, 27, 28, 29, 30, 31, 32, 33, 34, 35, 36, 37, 38, 39, 40, 41, 42, 43, 44, 45, 46, 47, 48, 49, or 50.

[0142] Bacteria

[0143] The genetically engineered microorganisms, or programmed microorganisms, such as recombinant bacteria of the disclosure are capable of producing one or more non-native effector molecules, therapeutic polypeptides, anti-inflammation and/or gut barrier function enhancer molecules, as described herein. In certain embodiments, the recombinant bacteria are obligate anaerobic bacteria. In certain embodiments, the recombinant bacteria are facultative anaerobic bacteria. In certain embodiments, the recombinant bacteria are aerobic bacteria. In some embodiments, the recombinant bacteria are Gram-positive bacteria. In some embodiments, the recombinant bacteria are Gram-positive bacteria and lack LPS. In some embodiments, the recombinant bacteria are Gram-negative bacteria. In some embodiments, the recombinant bacteria are Gram-positive and obligate anaerobic bacteria. In some embodiments, the recombinant bacteria are Gram-positive and facultative anaerobic bacteria. In some embodiments, the recombinant bacteria are non-pathogenic bacteria. In some embodiments, the recombinant bacteria are commensal bacteria. In some embodiments, the recombinant bacteria are probiotic bacteria. In some embodiments, the recombinant bacteria are naturally pathogenic bacteria that are modified or mutated to reduce or eliminate pathogenicity. Exemplary bacteria include, but are not limited to, Bacillus, Bacteroides, Bifidobacterium, Brevibacteria, Caulobacter, Clostridium, Enterococcus, Escherichia coli, Lactobacillus, Lactococcus, Listeria, Mycobacterium, Saccharomyces, Salmonella, Staphylococcus, Streptococcus, Vibrio, Bacillus coagulans, Bacillus subtilis, Bacteroides fragilis, Bacteroides subtilis, Bacteroides thetaiotaomicron, Bifidobacterium adolescentis, Bifidobacterium bifidum, Bifidobacterium breve UCC2003, Bifidobacterium infantis, Bifidobacterium lactis, Bifidobacterium longum, Clostridium acetobutylicum, Clostridium butyricum, Clostridium butyricum M-55, Clostridium cochlearum, Clostridium felsineum, Clostridium histolyticum, Clostridium multifermentans, Clostridium novyi-NT, Clostridium paraputrificum, Clostridium pasteureanum, Clostridium pectinovorum, Clostridium perfringens, Clostridium roseum, Clostridium sporogenes, Clostridium tertium, Clostridium tetani, Clostridium tyrobutyricum, Corynebacterium parvum, Escherichia coli MG1655, Escherichia coli Nissle 1917, Listeria monocytogenes, Mycobacterium bovis, Salmonella choleraesuis, Salmonella typhimurium, and Vibrio cholera. In certain embodiments, the recombinant bacteria are selected from the group consisting of Enterococcus faecium, Lactobacillus acidophilus, Lactobacillus bulgaricus, Lactobacillus casei, Lactobacillus johnsonii, Lactobacillus paracasei, Lactobacillus plantarum, Lactobacillus reuteri, Lactobacillus rhamnosus, Lactococcus lactis, and Saccharomyces boulardii, Clostridium clusters IV and XIVa of Firmicutes (including species of Eubacterium), Roseburia, Faecalibacterium, Enterobacter, Faecalibacterium prausnitzii, Clostridium difficile, Subdoligranulum, Clostridium sporogenes, Campylobacter jejuni, Clostridium saccharolyticum, Klebsiella, Citrobacter, Pseudobutyrivibrio, and Ruminococcus. In certain embodiments, the recombinant bacteria are selected from Bacteroides fragilis, Bacteroides thetaiotaomicron, Bacteroides subtilis, Bifidobacterium bifidum, Bifidobacterium infantis, Bifidobacterium lactis, Clostridium butyricum, Escherichia coli, Escherichia coli Nissle, Lactobacillus acidophilus, Lactobacillus plantarum, Lactobacillus reuteri, and Lactococcus lactis

[0144] In some embodiments, the recombinant bacterium is a Gram-positive bacterium, e.g., Clostridium, that is naturally capable of producing high levels of butyrate. In some embodiments, the recombinant bacterium is selected from the group consisting of C. butyricum ZJUCB, C. butyricum S21, C. thermobutyricum ATCC 49875, C. beijerinckii, C. populeti ATCC 35295, C. tyrobutyricum JM1, C. tyrobutyricum CIP 1-776, C. tyrobutyricum ATCC 25755, C. tyrobutyricum CNRZ 596, and C. tyrobutyricum ZJU 8235. In some embodiments, the recombinant bacterium is C. butyricum CBM588, a probiotic bacterium that is highly amenable to protein secretion and has demonstrated efficacy in treating IBD (Kanai et al., 2015). In some embodiments, the recombinant bacterium is Bacillus, a probiotic bacterium that is highly genetically tractable and has been a popular chassis for industrial protein production; in some embodiments, the bacterium has highly active secretion and/or no toxic byproducts (Cutting, 2011).

[0145] In one embodiment, the bacterial cell is a Bacteroides fragilis bacterial cell. In one embodiment, the bacterial cell is a Bacteroides thetaiotaomicron bacterial cell. In one embodiment, the bacterial cell is a Bacteroides subtilis bacterial cell. In one embodiment, the bacterial cell is a Bifidobacterium bifidum bacterial cell. In one embodiment, the bacterial cell is a Bifidobacterium infantis bacterial cell. In one embodiment, the bacterial cell is a Bifidobacterium lactis bacterial cell. In one embodiment, the bacterial cell is a Clostridium butyricum bacterial cell. In one embodiment, the bacterial cell is an Escherichia coli bacterial cell. In one embodiment, the bacterial cell is a Lactobacillus acidophilus bacterial cell. In one embodiment, the bacterial cell is a Lactobacillus plantarum bacterial cell. In one embodiment, the bacterial cell is a Lactobacillus reuteri bacterial cell. In one embodiment, the bacterial cell is a Lactococcus lactis bacterial cell.

[0146] In some embodiments, the recombinant bacteria are Escherichia coli strain Nissle 1917 (E. coli Nissle), a Gram-negative bacterium of the Enterobacteriaceae family that has evolved into one of the best characterized probiotics (Ukena et al., 2007). The strain is characterized by its complete harmlessness (Schultz, 2008), and has GRAS (generally recognized as safe) status (Reister et al., 2014, emphasis added). Genomic sequencing confirmed that E. coli Nissle lacks prominent virulence factors (e.g., E. coli α-hemolysin, P-fimbrial adhesins) (Schultz, 2008). In addition, it has been shown that E. coli Nissle does not carry pathogenic adhesion factors, does not produce any enterotoxins or cytotoxins, is not invasive, and not uropathogenic (Sonnenborn et al., 2009). As early as in 1917, E. coli Nissle was packaged into medicinal capsules, called Mutaflor, for therapeutic use. E. coli Nissle has since been used to treat ulcerative colitis in humans in vivo (Rembacken et al., 1999), to treat inflammatory bowel disease, Crohn's disease, and pouchitis in humans in vivo (Schultz, 2008), and to inhibit enteroinvasive Salmonella, Legionella, Yersinia, and Shigella in vitro (Altenhoefer et al., 2004). It is commonly accepted that E. coli Nissle's therapeutic efficacy and safety have convincingly been proven (Ukena et al., 2007). In some embodiments, the recombinant bacteria are E. coli Nissle and are naturally capable of promoting tight junctions and gut barrier function. In some embodiments, the recombinant bacteria are E. coli and are highly amenable to recombinant protein technologies.

[0147] One of ordinary skill in the art would appreciate that the genetic modifications disclosed herein may be adapted for other species, strains, and subtypes of bacteria. It is known, for example, that the clostridial butyrogenic pathway genes are widespread in the genome-sequenced clostridia and related species (Aboulnaga et al., 2013). Furthermore, genes from one or more different species of bacteria can be introduced into one another, e.g., the butyrogenic genes fromPeptoclostridium difficile have been expressed in Escherichia coli (Aboulnaga et al., 2013).

[0148] In one embodiment, the recombinant bacterial cell does not colonize the subject having the disorder. Unmodified E. coli Nissle and the recombinant bacteria may be destroyed, e.g., by defense factors in the gut or blood serum (Sonnenborn et al., 2009) or by activation of a kill switch, several hours or days after administration. Thus, the recombinant bacteria may require continued administration. Residence time in vivo may be calculated for the recombinant bacteria. In some embodiments, the residence time is calculated for a human subject. In some embodiments, residence time in vivo is calculated for the recombinant bacteria of the disclosure, e.g. as described herein.

[0149] In some embodiments, the bacterial cell is a recombinant bacterial cell. In another embodiment, the bacterial cell is a recombinant bacterial cell. In some embodiments, the disclosure comprises a colony of bacterial cells disclosed herein. In another aspect, the disclosure provides a recombinant bacterial culture which comprises bacterial cells disclosed herein.

[0150] In some embodiments, the recombinant bacteria comprising an effector molecule further comprise a kill-switch circuit, such as any of the kill-switch circuits provided herein. For example, in some embodiments, the recombinant bacteria further comprise one or more genes encoding one or more recombinase(s) under the control of an inducible promoter, and an inverted toxin sequence. In some embodiments, the recombinant bacteria further comprise one or more genes encoding an antitoxin. In some embodiments, the engineered bacteria further comprise one or more genes encoding one or more recombinase(s) under the control of an inducible promoter and one or more inverted excision genes, wherein the excision gene(s) encode an enzyme that deletes an essential gene. In some embodiments, the recombinant bacteria further comprise one or more genes encoding an antitoxin. In some embodiments, the engineered bacteria further comprise one or more genes encoding a toxin under the control of a promoter having a TetR repressor binding site and a gene encoding the TetR under the control of an inducible promoter that is induced by arabinose, such as ParaBAD. In some embodiments, the recombinant bacteria further comprise one or more genes encoding an antitoxin.

[0151] In some embodiments, the recombinant bacteria is an auxotroph comprising gene sequence encoding an effector molecule and further comprises a kill-switch circuit, such as any of the kill-switch circuits described herein.

[0152] In some embodiments of the above described recombinant bacteria, the gene encoding an effector molecule is present on a plasmid in the bacterium. In some embodiments, the gene sequence(s) encoding an effector molecule is present in the bacterial chromosome. In some embodiments, a gene sequence encoding a secretion protein or protein complex, such as any of the secretion systems disclosed herein, for secreting a biomolecule (e.g. an effector molecule), is present on a plasmid in the bacterium. In some embodiments, the gene sequence encoding a secretion protein or protein complex for secreting a biomolecule, such as any of the secretion systems disclosed herein, is present in the bacterial chromosome. In some embodiments, the gene sequence(s) encoding an antibiotic resistance gene is present on a plasmid in the bacterium. In some embodiments, the gene sequence(s) encoding an antibiotic resistance gene is present in the bacterial chromosome.

[0153] Secreted Polypeptides

[0154] IL-10

[0155] In some embodiments, the recombinant bacteria are capable of producing IL-10. Interleukin-10 (IL-10) is a class 2 cytokine, a category which includes cytokines, interferons, and interferon-like molecules, such as IL-19, IL-20, IL-22, IL-24, IL-26, IL-28A, IL-28B, IL-29, IFN-α, IFN-β, IFN-δ, IFN-ε, IFN-κ, IFN-τ, IFN-ω, and limitin. IL-10 is an anti-inflammatory cytokine that signals through two receptors, IL-10R1 and IL-10R2. Anti-inflammatory properties of human IL-10 include down-regulation of pro-inflammatory cytokines, inhibition of antigen presentation on dendritic cells or suppression of major histocompatibility complex expression. Deficiencies in IL-10 and/or its receptors are associated with IBD and intestinal sensitivity (Nielsen, 2014). Bacteria expressing IL-10 or protease inhibitors may ameliorate conditions such as Crohn's disease and ulcerative colitis (Simpson et al., 2014). The recombinant bacteria may comprise any suitable gene encoding IL-10, e.g., human IL-10. In some embodiments, the gene encoding IL-10 is modified and/or mutated, e.g., to enhance stability, increase IL-10 production, and/or increase anti-inflammatory potency under inducing conditions. In some embodiments, the recombinant bacteria are capable of producing IL-10 under inducing conditions, e.g., under a condition(s) associated with inflammation. In some embodiments, the recombinant bacteria are capable of producing IL-10 in low-oxygen conditions. In some embodiments, the recombinant bacteria comprise a nucleic acid sequence that encodes IL-10. In some embodiments, the recombinant bacteria comprise a nucleic acid sequence comprising SEQ ID NO: 141 or a functional fragment thereof. In some embodiments, recombinant bacteria comprise a nucleic acid sequence that is at least about 80%, at least about 85%, at least about 90%, at least about 95%, or at least about 99% homologous to a nucleic acid sequence comprising SEQ ID NO: 141 or a functional fragment thereof.

[0156] In some embodiments, the recombinant bacteria comprise a gene sequence encoding a monomerized form of IL-10. Wild type IL-10 (wtIL-10) is a domain swapped dimer whose structural integrity depends on the dimerization of two peptide chains. wtIL-10 was converted to a monomeric isomer by inserting 6 amino acids into the loop connecting the swapped secondary structural elements (see, e.g., Josephson, K. et al. J. Biol. Chem. 275, 13552-13557 (2000), and Yoon, S. I. et al. J. Biol. Chem. 287, 26586-26595 (2012). Monomoerized IL-10 therefore comnprises a small linker which deviates from the wild-type human IL-10 sequence. This linker causes the IL10 to become active as a monomer rather than a dimer.

[0157] Secretion of a monomeric protein may have advantages, avoiding the extra step of dimerization in the periplasmic space. Moreover, there is more flexibility in the selection of appropriate secretion systems. For example, the tat-dependent secretion system secretes polypeptides in a folded fashion. Dimers cannot fold correctly without the formation of disulfide bonds. Disulfide bonds, however, cannot form in the reducing intracellular environment and require the oxidizing environment of the periplasm to form. Therefore, the tat-dependent system may not be appropriate for the secretion of proteins which require dimerization to function properly.

[0158] In some embodiments, the recombinant bacteria are capable of producing viral IL-10. Exemplary viral IL-10 homologues encoded by the bacteria include human cytomegalo- (HCMV) and Epstein-Barr virus (EBV) IL-10. Apart from its anti-inflammatory effects, human IL-10 also possesses pro-inflammatory activity, e.g., stimulation of B-cell maturation and proliferation of natural killer cells (Foerster et al., BMC Biotechnol. 2013; 13: 82, and references therein). In contrast, viral IL-10 homologues share many biological activities of hIL-10 but, due to selective pressure during virus evolution and the need to escape the host immune system, also display unique traits, including increased stability and lack of immunostimulatory functions (Foerster et al, and references therein). As such, viral counterparts may be useful and possibly more effective than hIL-10 with respect to anti-inflammatory and/or immune suppressing effects.

[0159] In some embodiments, the recombinant bacteria are capable of producing viral IL-10 under inducing conditions, e.g., under a condition(s) associated with inflammation. In some embodiments, the recombinant bacteria are capable of producing viral IL-10 in low-oxygen conditions. In some embodiments, the recombinant bacteria comprise a nucleic acid sequence that encodes viral IL-10. In some embodiments, the viral d IL-10 expressed by the bacteria stimulates IL-10R1 and IL-10R2 and initiates signal transduction. Signaling includes Stat signaling, e.g. through the phosphorylation of Tyr705 and/or Ser727.

[0160] In some embodiments, the recombinant bacteria are capable of producing monomerized human IL-10. In some embodiments, the recombinant bacteria are capable of producing monomerized IL-10 under inducing conditions, e.g., under a condition(s) associated with inflammation. In some embodiments, the recombinant bacteria are capable of producing monomerized IL-10 in low-oxygen conditions. In some embodiments, the recombinant bacteria comprise a nucleic acid sequence that encodes monomerized IL-10. In some embodiments, the recombinant bacteria comprise a nucleic acid sequence comprising SEQ ID NO: 142 or a functional fragment thereof. In some embodiments, recombinant bacteria comprise a nucleic acid sequence that is at least about 80%, 85%, 90%, 95%, or 99% homologous to a nucleic acid sequence comprising SEQ ID NO: 142 or a functional fragment thereof. In some embodiments, the recombinant bacteria comprise a sequence which encodes the polypeptide encoded by SEQ ID NO: 142 or a fragment or functional variant thereof. In some embodiments, the monomerized IL-10 expressed by the bacteria stimulates IL-10R1 and IL-10R2 and initiates signal transduction. Signaling includes Stat signaling, e.g. through the phosphorylation of Tyr705 and/or Ser727.

[0161] In some embodiments, the recombinant bacteria encode a covalently linked human interleukin-10 fusion protein. In some embodiments, the recombinant bacteria comprise a gene sequences two interleukin-10 monomer subunits covalently linked by a linker. In some embodiments, the linker is a glycine-serine rich linker. In some embodiments, the linker is cysteine free. In some embodiments, the peptide linker is comprises one or more of (Gly3SerGly3)n (SEQ ID NO: 1081), (Gly2Ser1Gly2)n (SEQ ID NO: 1082), (GlySer1Gly)n (SEQ ID NO: 1083), and (Gly3Ser1Gly2)n (SEQ ID NO: 1084), wherein n is an integer independently selected from 0, 1, 2, 3 or 4. In some embodiments, the linker comprises GGGSGGGS (SEQ ID NO: 142). In some embodiments, the linker is covalently linked to the C-terminus of one interleukin-10 monomer subunit and the N-terminus of the second interleukin-10 monomer subunit.

[0162] A non-limiting example of an covalently linked human interleukin-10 fusion protein of the disclosure is provided in SEQ ID NO: 143. In some embodiments, the recombinant bacteria comprise one or more nucleic acid sequence(s) encoding a polypeptide of SEQ ID NO: 143 or a functional fragment thereof. In some embodiments, the recombinant bacteria comprise a nucleic acid sequence that encodes a polypeptide that is at least about 80%, 85%, 90%, 95%, or 99% homologous to the polypeptide sequence of SEQ ID NO: 143 or a functional fragment thereof.

[0163] In some embodiments, the recombinant bacteria comprise gene sequence encoding a IL-10 monomer fusion protein which comprises SEQ ID NO: 497 or a functional fragment thereof. In some embodiments, recombinant bacteria comprise a gene sequence encoding a IL-10 monomer polypeptide that is at least about 80%, 85%, 90%, 95%, or 99% identity to IL-10 monomer polypeptide comprising SEQ ID NO: 497 or a functional fragment thereof. In some embodiments, the IL-10 monomer polypeptide has at least about 85%, 86%, 87%, 88%, 89%, 90%, 91%, 92%, 93%, 94%, 95%, 96%, 97%, 98%, or 99% identity with SEQ ID NO: 497. In some specific embodiments, the IL-10 monomer polypeptide comprises SEQ ID NO: 497. In some embodiments, the recombinant bacteria comprise gene sequence encoding a IL-10 monomer fusion protein. In certain embodiments, the IL-10 monomer fusion protein gene sequence has at least about 80%, 85%, 90%, 95%, or 99% identity with SEQ ID NO: 493. In some embodiments, the IL-10 monomer gene sequence has at least about 80% 85%, 86%, 87%, 88%, 89%, 90%, 91%, 92%, 93%, 94%, 95%, 96%, 97%, 98%, or 99% identity with SEQ ID NO: 493. In some specific embodiments, the IL-10 monomer gene sequence comprises SEQ ID NO: 493.

[0164] In some embodiments, the recombinant bacteria comprise gene sequence encoding a IL-10-linker-IL-10 fusion protein which comprises SEQ ID NO: 143 or a functional fragment thereof. In some embodiments, recombinant bacteria comprise a gene sequence encoding a IL-10-linker-IL-10 polypeptide that is at least about 80%, 85%, 90%, 95%, or 99% identity to IL-10-linker-IL-10 polypeptide comprising SEQ ID NO: 143 or a functional fragment thereof. In some embodiments, the IL-10-linker-IL-10 polypeptide has at least about 85%, 86%, 87%, 88%, 89%, 90%, 91%, 92%, 93%, 94%, 95%, 96%, 97%, 98%, or 99% identity with SEQ ID NO: 143. In some specific embodiments, the IL-10-linker-IL-10 polypeptide comprises SEQ ID NO: 143. In some embodiments, the recombinant bacteria comprise gene sequence encoding a IL-10-linker-IL-10 protein. In certain embodiments, the IL-10-linker-IL-10 gene sequence has at least about 80%, 85%, 90%, 95%, or 99% identity with SEQ ID NO: 492. In some embodiments, the IL-10-linker-IL-10 gene sequence has at least about 85%, 86%, 87%, 88%, 89%, 90%, 91%, 92%, 93%, 94%, 95%, 96%, 97%, 98%, or 99% identity with SEQ ID NO: 492. In some specific embodiments, the IL-10-linker-IL-10 gene sequence comprises SEQ ID NO: 492.

[0165] In some embodiments, the recombinant bacteria comprise gene sequence encoding a linker fusion protein which comprises SEQ ID NO: 498 or a functional fragment thereof. In some embodiments, recombinant bacteria comprise a gene sequence encoding a linker polypeptide that is at least about 80%, 85%, 90%, 95%, or 99% identity to linker polypeptide comprising SEQ ID NO: 498 or a functional fragment thereof. In some embodiments, the linker polypeptide has at least about 85%, 86%, 87%, 88%, 89%, 90%, 91%, 92%, 93%, 94%, 95%, 96%, 97%, 98%, or 99% identity with SEQ ID NO: 498. In some specific embodiments, the linker polypeptide comprises SEQ ID NO: 498. In some embodiments, the gene sequence encoding ECOLIN 19410 secretion tag comprises SEQ ID NO: 498. In some embodiments, the recombinant bacteria comprise gene sequence encoding a linker fusion protein. In certain embodiments, the linker fusion protein gene sequence has at least about 80%, 85%, 90%, 95%, or 99% identity with SEQ ID NO: 494. In some embodiments, the linker gene sequence has at least about 85%, 86%, 87%, 88%, 89%, 90%, 91%, 92%, 93%, 94%, 95%, 96%, 97%, 98%, or 99% identity with SEQ ID NO: 494. In some specific embodiments, the linker gene sequence comprises SEQ ID NO: 494.

[0166] In any of these embodiments, the recombinant bacteria may further comprise gene sequences encoding a secretion tag. Non-limiting examples of such secretion tags are described herein and include PhoA, OmpF, cvaC, TorA, fdnG, dmsA, PelB, the ECOLIN_05715 secretion signal, ECOLIN_16495 secretion signal, ECOLIN_19410 secretion signal, and the ECOLIN_19880 secretion signal. In some embodiments, the secretion tag is PhoA. In some embodiments, the PhoA secretion tag comprises SEQ ID NO: 385. In some embodiments, the PhoA secretion tag comprises SEQ ID NO: 386.

[0167] In some embodiments, the recombinant bacteria comprise gene sequence encoding a PhoA-IL-10 fusion protein which comprises SEQ ID NO: 563 or a functional fragment thereof. In some embodiments, recombinant bacteria comprise a gene sequence encoding a PhoA-IL-10 polypeptide that is at least about 80%, 85%, 90%, 95%, or 99% identity to PhoA-IL-10 polypeptide comprising SEQ ID NO: 563 or a functional fragment thereof. In some embodiments, the PhoA-IL-10 polypeptide has at least about 85%, 86%, 87%, 88%, 89%, 90%, 91%, 92%, 93%, 94%, 95%, 96%, 97%, 98%, or 99% identity with SEQ ID NO: 563. In some specific embodiments, the PhoA-IL-10 polypeptide comprises SEQ ID NO: 563. In some embodiments, the recombinant bacteria comprise gene sequence encoding a PhoA-IL-10. In certain embodiments, the PhoA-IL-10 gene sequence has at least about 80%, 85%, 90%, 95%, or 99% identity with SEQ ID NO: 566. In some embodiments, the PhoA-IL-10 gene sequence has at least about 85%, 86%, 87%, 88%, 89%, 90%, 91%, 92%, 93%, 94%, 95%, 96%, 97%, 98%, or 99% identity with SEQ ID NO: 566. In some specific embodiments, the PhoA-IL-10 gene sequence comprises SEQ ID NO: 566.

[0168] In some embodiments, the recombinant bacteria comprise gene sequence encoding a PhoA-IL-10-linker-IL-10 fusion protein which comprises SEQ ID NO: 496 or a functional fragment thereof. In some embodiments, recombinant bacteria comprise a gene sequence encoding a PhoA-IL-10-linker-IL-10 polypeptide that is at least about 80%, 85%, 90%, 95%, or 99% identity to PhoA-IL-10-linker-IL-10 polypeptide comprising SEQ ID NO: 496 or a functional fragment thereof. In some embodiments, the PhoA-IL-10-linker-IL-10 polypeptide has at least about 85%, 86%, 87%, 88%, 89%, 90%, 91%, 92%, 93%, 94%, 95%, 96%, 97%, 98%, or 99% identity with SEQ ID NO: 496. In some specific embodiments, the PhoA-IL-10-linker-IL-10 polypeptide comprises SEQ ID NO: 496. In some embodiments, the recombinant bacteria comprise gene sequence encoding a PhoA-IL-10-linker-IL-10 protein. In certain embodiments, the PhoA-IL-10-linker-IL-10 fusion protein gene sequence has at least about 80%, 85%, 90%, 95%, or 99% identity with SEQ ID NO: 489. In some embodiments, the PhoA-IL-10-linker-IL-10 gene sequence has at least about 85%, 86%, 87%, 88%, 89%, 90%, 91%, 92%, 93%, 94%, 95%, 96%, 97%, 98%, or 99% identity with SEQ ID NO: 489. In some specific embodiments, the PhoA-IL-10-linker-IL-10 gene sequence comprises SEQ ID NO: 489.

[0169] In some embodiments, the secretion tag is ECOLIN 19410. In some embodiments, the ECOLIN 19410 secretion tag comprises SEQ ID NO: 397. In some embodiments, the ECOLIN 19410 secretion tag gene sequence comprises SEQ ID NO: 491. In some embodiments, the recombinant bacteria comprise gene sequence encoding a ECOLIN 19410-IL-10 fusion protein which comprises SEQ ID NO: 564 or a functional fragment thereof. In some embodiments, recombinant bacteria comprise a gene sequence encoding a ECOLIN 19410-IL-10 polypeptide that is at least about 80%, 85%, 90%, 95%, or 99% identity to ECOLIN 19410-IL-10 polypeptide comprising SEQ ID NO: 564 or a functional fragment thereof. In some embodiments, the ECOLIN 19410-IL-10 polypeptide has at least about 85%, 86%, 87%, 88%, 89%, 90%, 91%, 92%, 93%, 94%, 95%, 96%, 97%, 98%, or 99% identity with SEQ ID NO: 564. In some specific embodiments, the ECOLIN 19410-IL-10 polypeptide comprises SEQ ID NO: 564. In some embodiments, the recombinant bacteria comprise gene sequence encoding a ECOLIN 19410-IL-10 fusion protein. In certain embodiments, the ECOLIN 19410-IL-10 fusion protein gene sequence has at least about 80%, 85%, 90%, 95%, or 99% identity with SEQ ID NO: 566. In some embodiments, the ECOLIN 19410-IL-10 gene sequence has at least about 85%, 86%, 87%, 88%, 89%, 90%, 91%, 92%, 93%, 94%, 95%, 96%, 97%, 98%, or 99% identity with SEQ ID NO: 566. In some specific embodiments, the ECOLIN 19410-IL-10 gene sequence comprises SEQ ID NO: 566.

[0170] In some embodiments, the recombinant bacteria comprise gene sequence encoding a ECOLIN 19410-IL-10-linker-IL-10 fusion protein which comprises SEQ ID NO: 495 or a functional fragment thereof. In some embodiments, recombinant bacteria comprise a gene sequence encoding a ECOLIN 19410-IL-10-linker-IL-10 polypeptide that is at least about 80%, 85%, 90%, 95%, or 99% identity to ECOLIN 19410-IL-10-linker-IL-10 polypeptide comprising SEQ ID NO: 495 or a functional fragment thereof. In some embodiments, the ECOLIN 19410-IL-10-linker-IL-10 polypeptide has at least about 85%, 86%, 87%, 88%, 89%, 90%, 91%, 92%, 93%, 94%, 95%, 96%, 97%, 98%, or 99% identity with SEQ ID NO: 495. In some specific embodiments, the ECOLIN 19410-IL-10-linker-IL-10 polypeptide comprises SEQ ID NO: 495. In some embodiments, the recombinant bacteria comprise gene sequence encoding a ECOLIN 19410-IL-10-linker-IL-10 fusion protein. In certain embodiments, the ECOLIN 19410-IL-10-linker-IL-10 fusion protein gene sequence has at least about 80%, 85%, 90%, 95%, or 99% identity with SEQ ID NO: 488. In some embodiments, the ECOLIN 19410-IL-10-linker-IL-10 gene sequence has at least about 85%, 86%, 87%, 88%, 89%, 90%, 91%, 92%, 93%, 94%, 95%, 96%, 97%, 98%, or 99% identity with SEQ ID NO: 488. In some specific embodiments, the ECOLIN 19410-IL-10-linker-IL-10 gene sequence comprises SEQ ID NO: 488.

[0171] In any of these embodiments, the IL-10 constructs described herein may further comprise a secretion tag. Non-limiting examples of secretion tags are described herein. The secretion tag is at the N-terminus or at the C-terminus.

[0172] In some embodiments, the genetically engineered are capable of producing and secreting IL-10. In some embodiments, the IL-10 gene is functionally replaced, modified, and/or mutated in order to enhance stability and/or increase IL-10 production or secretion. In some embodiments, the recombinant bacteria are capable of expressing and secreting IL-10 in low-oxygen conditions, in the presence of certain molecules or metabolites, in the presence of molecules or metabolites associated with inflammation or an inflammatory response, or in the presence of some other metabolite that may or may not be present in the gut, such as arabinose. Exemplary chemical inducers are described herein.

[0173] In one embodiment, the IL-10 gene is directly operably linked to a first promoter. In another embodiment, the IL-10 gene is indirectly operably linked to a first promoter. In one embodiment, the promoter is not operably linked with the IL-10 gene in nature.

[0174] In some embodiments, the IL-10 gene is expressed under the control of a constitutive promoter. In another embodiment, the IL-10 gene is expressed under the control of an inducible promoter. In some embodiments, the IL-10 gene is expressed under the control of a promoter that is directly or indirectly induced by exogenous environmental conditions. In one embodiment, the IL-10 gene is expressed under the control of a promoter that is directly or indirectly induced by low-oxygen or anaerobic conditions, wherein expression of the IL-10 gene is activated under low-oxygen or anaerobic environments, such as the environment of the mammalian gut. Inducible promoters are described in more detail infra.

[0175] The IL-10 gene may be present on a plasmid or chromosome in the bacterial cell. In one embodiment, the IL-10 gene is located on a plasmid in the bacterial cell. In another embodiment, the IL-10 gene is located in the chromosome of the bacterial cell. In yet another embodiment, a native copy of the IL-10 gene is located in the chromosome of the bacterial cell. The IL-10 gene may be expressed on a low-copy plasmid or a high-copy plasmid. The high-copy plasmid may be useful for increasing expression of IL-10.

[0176] IL-2

[0177] In some embodiments, the recombinant bacteria are capable of producing IL-2. Interleukin 2 (IL-2) mediates autoimmunity by preserving health of regulatory T cells (Treg). Treg cells, including those expressing Foxp3, typically suppress effector T cells that are active against self-antigens, and in doing so, can dampen autoimmune activity. IL-2 functions as a cytokine to enhance Treg cell differentiation and activity while diminished IL-2 activity can promote autoimmunity events. IL-2 is generated by activated CD4+ T cells, and by other immune mediators including activated CD8+ T cells, activated dendritic cells, natural killer cells, and NK T cells. IL-2 binds to IL-2R, which is composed of three chains including CD25, CD122, and CD132. IL-2 promotes growth of Treg cells in the thymus, while preserving their function and activity in systemic circulation. Treg cell activity plays an intricate role in the IBD setting, with murine studies suggesting a protective role in disease pathogenesis. In some embodiments, the recombinant bacteria comprise a nucleic acid sequence encoding a polypeptide of SEQ ID NO: 144 or a functional fragment thereof. In some embodiments, recombinant bacteria comprise a nucleic acid sequence that is at least about 80%, 85%, 90%, 95%, or 99% homologous to a nucleic acid sequence encoding a polypeptide of SEQ ID NO: 144 or a functional fragment thereof. In some embodiments, the recombinant bacteria are capable of producing IL-2 under inducing conditions, e.g., under a condition(s) associated with inflammation. In some embodiments, the recombinant bacteria are capable of producing IL-2 in low-oxygen conditions.

[0178] In some embodiments, the recombinant bacteria comprise a nucleic acid sequence encoding an IL-2 mutein (IL-2 molecule with one or more mutations). Non-limiting examples of IL-2-muteins can be found at least in in WO2016/164937, U.S. Pat. Nos. 9,580,486, 7,105,653, 9,616,105, 9,428,567, US2017/0051029, US2014/0286898A1, WO2014153111A2, WO2010/085495, WO2016014428A2, WO2016025385A1, and US20060269515, each of which are incorporated by reference in its entirety.

[0179] In some embodiments, the alanine at position 2 of SEQ ID NO: 144 is deleted. In some embodiments, the IL-2 mutein molecule comprises a serine substituted for cysteine at position 126 of the IL-2 sequence (SEQ ID NO: 144). Other combinations of mutations and substitutions that are IL-2 mutein molecules are described in US20060269515, which is incorporated by reference in its entirety. In some embodiments, the cysteine at position 125 (position 126 in SEQ ID NO: 144) is also substituted with a valine or alanine. In some embodiments, the IL-2 mutein molecule comprises a V91K substitution (position 92 in SEQ ID NO: 144). In some embodiments, the IL-2 mutein molecule comprises a N88D substitution (position 89 in SEQ ID NO: 144). In some embodiments, the IL-2 mutein molecule comprises a N88R substitution (position 89 in SEQ ID NO: 144). In some embodiments, the IL-2 mutein molecule comprises a substitution of H16E, D84K, V91N, N88D, V91K, or V91R, any combinations thereof (position 17, 85, 92, 89, 92, or 92, respectively, in SEQ ID NO: 144). In some embodiments, the IL-2 mutein molecule comprises one or more substitutions selected from the group consisting of: T3N or T3A (position 4 in SEQ ID NO: 144); L12G, L12K, L12Q, or L12S (position 13 in SEQ ID NO: 144); Q13G (position 14 in SEQ ID NO: 144); E15A, E15G, or E15S (position 16 in SEQ ID NO: 144); H16A, H16D, H16G, H16K, H16M, H16N, H16R, H16S, H16T, H16V, or H16Y (position 17 in SEQ ID NO: 144); L19A, L19D, L19E, L19G, L19N, L19R, L19S, L19T, or L19V (position 20 in SEQ ID NO: 144); D20A, D20E, D20H, D201, D20Y, D20F, D20G, D20T, or D20W (position 21 in SEQ ID NO: 144); M23R (position 24 in SEQ ID NO: 144); R81A, R81G, R81S, or R81T (position 82 in SEQ ID NO: 144); D84A, D84E, D84G, D84I, D84M, D84Q D84R, D84S, or D84T (position 85 in SEQ ID NO: 144); S87R (position 88 in SEQ ID NO: 144); N88A, N88D, N88E, N88I, N88F, N88G, N88M, N88R, N88S, N88V, or N88W (position 89 in SEQ ID NO: 144); V91D, V91E, V91G, or V91S (position 92 in SEQ ID NO: 144); 192K, or I92R (position 93 in SEQ ID NO: 144); E95G (position 96 in SEQ ID NO: 144); and Q126 (position 127 in SEQ ID NO: 144). In some embodiments, the amino acid sequence of the IL-2 mutein molecule comprises a C125A or C125S substitution (position 126 in SEQ ID NO: 144) and with one substitution selected from T3N or T3A (position 4 in SEQ ID NO: 144); L12G, L12K, L12Q or L12S (position 13 in SEQ ID NO: 144); Q13G (position 14 in SEQ ID NO: 144); E15A, E15G, or E15S (position 16 in SEQ ID NO: 144); H16A, H16D, H16G, H16K, H16M, H16N, H16R, H165, H16T, H16V, or H16Y (position 17 in SEQ ID NO: 144); L19A, L19D, L19E, L19G, L19N, L19R, L19S, L19T, or L19V (position 20 in SEQ ID NO: 144); D20A, D20E, D20F, D20G, D20T, or D20W (position 21 in SEQ ID NO: 144); M23R (position 24 in SEQ ID NO: 144); R81A, R81G, R81S, or R81T (position 82 in SEQ ID NO: 144); D84A, D84E, D84G, D84I, D84M, D84Q, D84R, D84S, or D84T (position 85 in SEQ ID NO: 144); S87R (position 88 in SEQ ID NO: 144); N88A, N88D, N88E, N88F, N88I, N88G, N88M, N88R, N88S, N88V, or N88W (position 89 in SEQ ID NO: 144); V91D, V91E, V91G, or V91S (position 92 in SEQ ID NO: 144); I92K, or I92R (position 93 in SEQ ID NO: 144); E95G (position 96 in SEQ ID NO: 144); and Q1261, Q126L, or Q126F (position 127 in SEQ ID NO: 144). In some embodiments, the IL-2 mutein molecule comprises a C125A or C125S substitution (position 126 in SEQ ID NO: 144) and with one substitution selected from D20H, D201, D20Y, D20E, D20G, or D20W (position 21 in SEQ ID NO: 144); D84A, or D84S (position 85 in SEQ ID NO: 144); H16D, H16G, H16K, H16R, H16T, or H16V (position 17 in SEQ ID NO: 144); I92K, or I92R (position 93 in SEQ ID NO: 144); L12K (position 13 in SEQ ID NO: 144); L19D, L19N, or L19T (position 20 in SEQ ID NO: 144); N88D, N88R, or N88S (position 89 in SEQ ID NO: 144); and V91D, V91G, V91K, or V91S (position 92 in SEQ ID NO: 144). In some embodiments, the IL-2 mutein comprises N88R (position 89 in SEQ ID NO: 144) and/or D20H (position 21 in SEQ ID NO: 144) mutations.

[0180] In some embodiments, the IL-2 mutein comprises a mutation at one more of positions 30, 32, 36, 38, 49, 70, 72, 75, 89, and 126 that correspond to SEQ ID NO: 144. The substitutions can be used alone or in combination with one another. In some embodiments, the IL-2 mutein comprises substitutions at 3, 4, 5, 6, 7, 8, 9, 10 or each of positions 50, 52, 56, 58, 69, 90, 92, 95, 109, and 146. Non-limiting examples such combinations include, but are not limited to, a mutation at positions 50, 52, 56, 58, 69, 90, 92, 95, 109, and 146; 50, 52, 56, 58, 69, 90, 92, 95, and 109; 50, 52, 56, 58, 69, 90, 92, and 95; 50, 52, 56, 58, 69, 90, and 92; 50, 52, 56, 58, 69, and 90; 50, 52, 56, 58, and 69; 50, 52, 56, and 58; 50, 52, and 56; 50 and 52; 52, 56, 58, 69, 90, 92, 95, 109, and 146; 52, 56, 58, 69, 90, 92, 95, and 109; 52, 56, 58, 69, 90, 92, and 95; 52, 56, 58, 69, 90, and 92; 52, 56, 58, 69, and 90; 56, 58, and 69; 56 and 58; 56, 58, 69, 90, 92, 95, 109, and 146; 56, 58, 69, 90, 92, 95, and 109; 56, 58, 69, 90, 92, and 95; 56, 58, 69, 90, and 92; 56, 57, 69, and 90; 56, 58, and 69; 56 and 58; 58, 69, 90, 92, 95, 109, and 146; 58, 69, 90, 92, 95, and 109; 58, 69, 90, 92, and 95; 58, 69, 90, and 92; 58, 69, and 90; 58 and 69; 69, 90, 92, 95, 109, and 146; 69, 90, 92, 95, and 109; 69, 90, 92, and 95; 69, 90, and 92; 69 and 90; 90, 92, 95, 109, and 146; 90, 92, 95, and 109; 90, 92, and 95; 90 and 92; 92, 95, 109, and 146; 92, 95, and 109; 92, and 95; or 95 and 109. Each mutation can be combined with one another. The same substitutions can be made in SEQ ID NO: 144.

[0181] In some embodiments, the recombinant bacteria comprise one or more gene sequence(s) selected from PhoA-IL-2, OmpF-IL-2, and TorA-IL-2.

[0182] IL-22

[0183] In some embodiments, the recombinant bacteria are capable of producing IL-22. Interleukin 22 (IL-22) cytokine can be produced by dendritic cells, lymphoid tissue inducer-like cells, natural killer cells and expressed on adaptive lymphocytes. Through initiation of Jak-STAT signaling pathways, IL-22 expression can trigger expression of antimicrobial compounds as well as a range of cell growth related pathways, both of which enhance tissue repair mechanisms. IL-22 is critical in promoting intestinal barrier fidelity and healing, while modulating inflammatory states. Murine models have demonstrated improved intestinal inflammation states following administration of IL-22. Additionally, IL-22 activates STAT3 signaling to promote enhanced mucus production to preserve barrier function. IL-22's association with IBD susceptibility genes may modulate phenotypic expression of disease as well. In some embodiments, the recombinant bacteria comprise a nucleic acid sequence encoding SEQ ID NO: 145 or a functional fragment thereof. In some embodiments, recombinant bacteria comprise a nucleic acid sequence that is at least about 80%, 85%, 90%, 95%, or 99% homologous to a nucleic acid sequence encoding SEQ ID NO: 145 a functional fragment thereof. In some embodiments, the recombinant bacteria are capable of producing IL-22 under inducing conditions, e.g., under a condition(s) associated with inflammation. In some embodiments, the recombinant bacteria are capable of producing IL-22 in low-oxygen conditions.

[0184] In some embodiments, the recombinant bacteria comprise one or more gene sequence(s) selected from PhoA-IL-22, OmpF-IL-22, and TorA-IL-22.

[0185] IL-27

[0186] In some embodiments, the recombinant bacteria are capable of producing IL-27. Interleukin 27 (IL-27) cytokine is predominately expressed by activated antigen presenting cells, while IL-27 receptor is found on a range of cells including T cells, NK cells, among others. In particular, IL-27 suppresses development of pro-inflammatory T helper 17 (Th17) cells, which play a critical role in IBD pathogenesis. Further, IL-27 can promote differentiation of IL-10 producing Tr1 cells and enhance IL-10 output, both of which have anti-inflammatory effects. IL-27 has protective effects on epithelial barrier function via activation of MAPK and STAT signaling within intestinal epithelial cells. Additionally, IL-27 enhances production of antibacterial proteins that curb bacterial growth. Improvement in barrier function and reduction in bacterial growth suggest a favorable role for IL-27 in IBD pathogenesis. In some embodiments, the recombinant bacteria comprise a nucleic acid sequence encoding SEQ ID NO: 146 or a functional fragment thereof. In some embodiments, recombinant bacteria comprise a nucleic acid sequence that is at least about 80%, 85%, 90%, 95%, or 99% homologous to a nucleic acid sequence encoding SEQ ID NO: 146 or a functional fragment thereof. In some embodiments, the recombinant bacteria are capable of producing IL-27 under inducing conditions, e.g., under a condition(s) associated with inflammation. In some embodiments, the recombinant bacteria are capable of producing IL-27 in low-oxygen conditions.

[0187] In some embodiments, the recombinant bacteria comprise one or more gene sequence(s) selected from PhoA-IL-27, OmpF-IL-27, and TorA-IL-27.

[0188] SOD

[0189] In some embodiments, the recombinant bacteria are capable of producing superoxide dismutase (SOD). Increased ROS levels contribute to pathophysiology of inflammatory bowel disease. Increased ROS levels may lead to enhanced expression of vascular cell adhesion molecule 1 (VCAM-1), which can facilitate translocation of inflammatory mediators to disease affected tissue, and result in a greater degree of inflammatory burden. Antioxidant systems including superoxide dismutase (SOD) can function to mitigate overall ROS burden. However, studies indicate that the expression of SOD in the setting of IBD may be compromised, e.g., produced at lower levels in IBD, thus allowing disease pathology to proceed. Further studies have shown that supplementation with SOD to rats within a colitis model is associated with reduced colonic lipid peroxidation and endothelial VCAM-1 expression as well as overall improvement in inflammatory environment. Thus, in some embodiments, the recombinant bacteria comprise a nucleic acid sequence encoding a polypeptide of SEQ ID NO: 147 or a functional fragment thereof. In some embodiments, recombinant bacteria comprise a nucleic acid sequence that is at least about 80%, 85%, 90%, 95%, or 99% homologous to a nucleic acid sequence encoding a polypeptide of SEQ ID NO: 147 or a functional fragment thereof. In some embodiments, the recombinant bacteria are capable of producing SOD under inducing conditions, e.g., under a condition(s) associated with inflammation. In some embodiments, the recombinant bacteria are capable of producing SOD in low-oxygen conditions.

[0190] GLP2

[0191] In some embodiments, the recombinant bacteria are capable of producing GLP-2 or proglucagon. Glucagon-like peptide 2 (GLP-2) is produced by intestinal endocrine cells and stimulates intestinal growth and enhances gut barrier function. GLP-2 administration has therapeutic potential in treating IBD, short bowel syndrome, and small bowel enteritis (Yazbeck et al., 2009). The recombinant bacteria may comprise any suitable gene encoding GLP-2 or proglucagon, e.g., human GLP-2 or proglucagon. In some embodiments, a protease inhibitor, e.g., an inhibitor of dipeptidyl peptidase, is also administered to decrease GLP-2 degradation. In some embodiments, the recombinant bacteria express a degradation resistant GLP-2 analog, e.g., Teduglutide (Yazbeck et al., 2009). In some embodiments, the gene encoding GLP-2 or proglucagon is modified and/or mutated, e.g., to enhance stability, increase GLP-2 production, and/or increase gut barrier enhancing potency under inducing conditions. In some embodiments, the recombinant bacteria are capable of producing GLP-2 or proglucagon under inducing conditions. GLP-2 administration in a murine model of IBD is associated with reduced mucosal damage and inflammation, as well as a reduction in inflammatory mediators, such as TNF-α and IFN-gamma. Further, GLP-2 supplementation may also lead to reduced mucosal myeloperoxidase in colitis/ileitis models.

[0192] In some embodiments, the recombinant bacteria comprise a gene sequence encoding GLP-2. In some embodiments, the recombinant bacteria comprise a gene sequence encoding SEQ ID NO: 148 or a functional fragment thereof. In some embodiments, recombinant bacteria comprise a nucleic acid sequence that is at least about 80%, 85%, 90%, 95%, or 99% homologous to a nucleic acid sequence encoding SEQ ID NO: 148 or a functional fragment thereof. In certain embodiments, the GLP-2 gene sequence has at least about 80% identity with SEQ ID NO: 523. In certain embodiments, the GLP-2 gene sequence has at least about 90% identity with SEQ ID NO: 523. In certain embodiments, the GLP-2 gene sequence has at least about 95% identity with SEQ ID NO: 523. In some embodiments, the GLP-2 gene sequence has at least about 85%, 86%, 87%, 88%, 89%, 90%, 91%, 92%, 93%, 94%, 95%, 96%, 97%, 98%, or 99% identity with SEQ ID NO: 523. In some specific embodiments, the GLP-2 gene sequence comprises SEQ ID NO: 523. In other specific embodiments, the GLP-2 gene sequence consists of SEQ ID NO: 523.

[0193] In some embodiments, the recombinant bacteria are capable of producing GLP-2 under inducing conditions, e.g., under a condition(s) associated with inflammation. In some embodiments, the recombinant bacteria are capable of producing GLP-2 in low-oxygen conditions.

[0194] In some embodiments, the recombinant bacteria comprise gene sequence(s) for the production of GLP-2-Fc fusion proteins. In some embodiments, the recombinant bacteria comprise gene sequence(s) encoding GLP2-Fc fusion protein(s). In some embodiments, the recombinant bacteria comprise gene sequence(s) encoding GLP2-FcIgA fusion protein(s). In some embodiments, the GLP-2 polypeptide is located N terminally relative to the Fc polypeptide. In some embodiments, the GLP-2 polypeptide is located C-terminally relative to the polypeptide.

[0195] In some embodiments, the recombinant bacteria comprise gene sequence(s) encoding GLP2-FcIgG fusion protein(s). In some embodiments, the Fc portion of the human IgA used herein contains the hinge, CH2 and CH3 regions of the Fc protein. In some embodiments, the Fc portion of the human IgA used herein contains the hinge, CH1, CH2 and CH3 regions of the Fc protein. In some embodiments, the Fc portion of the human IgA used herein contains the hinge, and CH2 region of the Fc protein. In some embodiments, the Fc portion of the human IgA used herein contains the hinge, and CH3 region of the Fc protein. In some embodiments, the Fc portion of the human IgA used herein contains the hinge, and CH1 region of the Fc protein.

TABLE 3
Non-limiting Examples of GLP-2 Polypeptide Sequences

Construct comprising human GLP2 - linker - Fc (human IgA) (SEQ ID
NO: 537)
Construct comprising PhoA-GLP2 (SEQ ID NO: 538)
Construct comprising ECOLIN 19410-GLP2 (SEQ ID NO: 539)
Construct comprising mutated GLP2 - linker - Fc (human IgA) (SEQ ID
NO: 540)
Construct comprising PhoA-mutated GLP2 (SEQ ID NO: 541)
Construct comprising ECOLIN 19410-mutated GLP2 (SEQ ID NO: 542)
Construct comprising PhoA secretion tag -mutated human GLP2 -
linker - Fc (human IgA) - 8X His Tag (SEQ ID NO: 543)
Construct comprising PhoA secretion tag -mutated human GLP2 -
linker - Fc (human IgA) (SEQ ID NO: 544)
Construct comprising ECOLIN 19410 secretion tag -mutated human
GLP2 - linker - Fc (human IgA) - 8X His Tag (SEQ ID NO: 545)
Construct comprising ECOLIN 19410 secretion tag -mutated human
GLP2 - linker - Fc (human IgA) (SEQ ID NO: 546)

TABLE 4
Non-limiting Examples of GLP-2 fusion
protein Polynucleotide Sequences

Construct comprising human GLP2 - linker - Fc (human IgA) (SEQ ID
NO: 547)
Second construct comprising human GLP2 - linker - Fc (human IgA)
(SEQ ID NO: 548)
PhoA-GLP-2 (SEQ ID NO: 549)
ECOLIN 19410- GLP-2 (SEQ ID NO: 550)

TABLE 5
Non-limiting Examples of Mutant GLP-2
Fusion Protein Polynucleotide Sequences

Construct comprising PhoA secretion tag -mutated GLP2 - linker - Fc
(human IgA) - 8X His Tag (SEQ ID NO: 551)
Second construct comprising PhoA secretion tag - mutated GLP2 -
linker - Fc (human IgA) - 8X His Tag (SEQ ID NO: 552)
Construct comprising PhoA secretion tag - mutated GLP2 - linker - Fc
(human IgA) (SEQ ID NO: 553)
Second construct comprising PhoA secretion tag - mutated GLP2 -
linker - Fc (human IgA) (SEQ ID NO: 554)
Construct comprising secretion tag from ECOLIN 19410 - mutated
GLP2-linker-Fc (human IgA) - - 8X His Tag (SEQ ID NO: 555)
Second construct comprising secretion tag from ECOLIN 19410 -
mutated GLP2-linker-Fc (human IgA) - - 8X His Tag (SEQ ID NO: 556)
Construct comprising secretion tag from ECOLIN 19410 - mutated
GLP2-linker-Fc (human IgA) (SEQ ID NO: 557)
Second construct comprising secretion tag from ECOLIN 19410 -
mutated GLP2-linker-Fc (human IgA) (SEQ ID NO: 558)
Construct comprising mutated GLP2 - linker - Fc (human IgA) (SEQ ID
NO: 559)
Second construct comprising mutated GLP2 - linker - Fc (human IgA)
(SEQ ID NO: 560)
PhoA- mutated GLP-2 (SEQ ID NO: 561)
ECOLIN 19410- mutated GLP-2 (SEQ ID NO: 562)

[0196] In one embodiment, the 33 amino acid human GLP-2 sequence e.g., of SEQ ID NO: 148 is fused to the N-terminus of the Fc portion of human IgA protein, e.g., SEQ ID NO: 499 linked by a 20 amino acid linker, e.g., SEQ ID NO: 509.

[0197] In some embodiments, the recombinant bacteria comprise a Fc (IgA) gene sequence encoding SEQ ID NO: 499 or a functional fragment thereof. In some embodiments, recombinant bacteria comprise a Fc (IgA) gene sequence encoding a polypeptide that is at least about 80%, 85%, 90%, 95%, or 99% identity to a Fc (IgA) polypeptide comprising SEQ ID NO: 499 or a functional fragment thereof. In some embodiments, the Fc (IgA) polypeptide has at least about 85%, 86%, 87%, 88%, 89%, 90%, 91%, 92%, 93%, 94%, 95%, 96%, 97%, 98%, or 99% identity with SEQ ID NO: 499. In some specific embodiments, the Fc (IgA) polypeptide comprises SEQ ID NO: 499. In other specific embodiments, the Fc (IgA) polypeptide consists of SEQ ID NO: 499. In some embodiments, the recombinant bacteria comprise gene sequence encoding a Fc (IgA) fusion protein. In certain embodiments, the Fc (IgA) gene sequence has at least about 80%, 85%, 90%, 95%, or 99% identity with SEQ ID NO: 527. In some embodiments, the Fc (IgA) gene sequence has at least about 85%, 86%, 87%, 88%, 89%, 90%, 91%, 92%, 93%, 94%, 95%, 96%, 97%, 98%, or 99% identity with SEQ ID NO: 527. In some specific embodiments, the Fc (IgA) gene sequence comprises SEQ ID NO: 527. In other specific embodiments, the Fc (IgA) gene sequence consists of SEQ ID NO: 527. In certain embodiments, the Fc (IgA) gene sequence has at least about 80%, 85%, 90%, 95%, or 99% identity with SEQ ID NO: 528. In some embodiments, the Fc (IgA) gene sequence has at least about 85%, 86%, 87%, 88%, 89%, 90%, 91%, 92%, 93%, 94%, 95%, 96%, 97%, 98%, or 99% identity with SEQ ID NO: 528. In some specific embodiments, the Fc (IgA) gene sequence comprises SEQ ID NO: 528. In other specific embodiments, the Fc (IgA) gene sequence consists of SEQ ID NO: 528.

[0198] In some embodiments, the recombinant bacteria comprise a linker gene sequence encoding SEQ ID NO: 509 or a functional fragment thereof. In some embodiments, recombinant bacteria comprise a linker gene sequence encoding a linker that is at least about 80%, 85%, 90%, 95%, or 99% identity to a linker comprising SEQ ID NO: 509 or a functional fragment thereof. In some embodiments, the linker polypeptide has at least about 85%, 86%, 87%, 88%, 89%, 90%, 91%, 92%, 93%, 94%, 95%, 96%, 97%, 98%, or 99% identity with SEQ ID NO: 509. In some specific embodiments, the linker polypeptide comprises SEQ ID NO: 509. In other specific embodiments, the linker polypeptide consists of SEQ ID NO: 509.

[0199] In some embodiments, the recombinant bacteria comprise gene sequence encoding a glp2-linker Fc (IgA) fusion protein. In some embodiments, the recombinant bacteria comprise gene sequence(s) encoding the GLP-2 fusion protein of SEQ ID NO: 537. In some embodiments, the recombinant bacteria comprise a glp2-linker Fc (IgA) gene sequence encoding SEQ ID NO: 537 or a functional fragment thereof. In some embodiments, recombinant bacteria comprise a glp2-linker Fc (IgA) gene sequence encoding a polypeptide that is at least about 80%, 85%, 90%, 95%, or 99% identity to a glp2-linker Fc (IgA) polypeptide comprising SEQ ID NO: 537 or a functional fragment thereof. In some embodiments, the glp2-linker Fc (IgA) polypeptide has at least about 85%, 86%, 87%, 88%, 89%, 90%, 91%, 92%, 93%, 94%, 95%, 96%, 97%, 98%, or 99% identity with SEQ ID NO: 537. In some specific embodiments, the glp2-linker Fc (IgA) polypeptide comprises SEQ ID NO: 537. In other specific embodiments, the glp2-linker Fc (IgA) polypeptide consists of SEQ ID NO: 537. In certain embodiments, the glp2-linker Fc (IgA) gene sequence has at least about 80%, 85%, 90%, 95%, or 99% identity with SEQ ID NO: 547. In some embodiments, the glp2-linker Fc (IgA) gene sequence has at least about 85%, 86%, 87%, 88%, 89%, 90%, 91%, 92%, 93%, 94%, 95%, 96%, 97%, 98%, or 99% identity with SEQ ID NO: 547. In some specific embodiments, the glp2-linker Fc (IgA) gene sequence comprises SEQ ID NO: 547. In other specific embodiments, the glp2-linker Fc (IgA) gene sequence consists of SEQ ID NO: 547.

[0200] In certain embodiments, the glp2-linker Fc (IgA) gene sequence has at least about 80%, 85%, 90%, 95%, or 99% identity with SEQ ID NO: 548. In some embodiments, the glp2-linker Fc (IgA) gene sequence has at least about 85%, 86%, 87%, 88%, 89%, 90%, 91%, 92%, 93%, 94%, 95%, 96%, 97%, 98%, or 99% identity with SEQ ID NO: 548. In some specific embodiments, the glp2-linker Fc (IgA) gene sequence comprises SEQ ID NO: 548. In other specific embodiments, the glp2-linker Fc (IgA) gene sequence consists of SEQ ID NO: 548.

[0201] In any of these embodiments, the recombinant bacteria may further comprise gene sequences encoding a secretion tag. Non-limiting examples of such secretion tags are described herein and include PhoA, OmpF, cvaC, TorA, fdnG, dmsA, PelB, the ECOLIN_05715 secretion signal, ECOLIN_16495 secretion signal, ECOLIN_19410 secretion signal, and the ECOLIN_19880 secretion signal. In some embodiments, the secretion tag is PhoA. In some embodiments, the PhoA secretion tag comprises SEQ ID NO: 385. In some embodiments, the PhoA secretion tag comprises SEQ ID NO: 386. In some embodiments, the recombinant bacteria comprise PhoA tag gene sequence comprising SEQ ID NO: 490. In some embodiments, the recombinant bacteria comprise gene sequence encoding a PhoA-GLP-2 fusion protein. In some embodiments, the recombinant bacteria comprise a PhoA-GLP-2 fusion gene sequence encoding SEQ ID NO: 538 or a functional fragment thereof. In some embodiments, recombinant bacteria comprise a PhoA-GLP-2 fusion gene sequence encoding a polypeptide that is at least about 80%, 85%, 90%, 95%, or 99% homologous to PhoA-GLP-2 fusion polypeptide comprising SEQ ID NO: 538 or a functional fragment thereof. In some embodiments, the PhoA-GLP-2 fusion polypeptide has at least about 85%, 86%, 87%, 88%, 89%, 90%, 91%, 92%, 93%, 94%, 95%, 96%, 97%, 98%, or 99% identity with SEQ ID NO: 538. In some specific embodiments, the PhoA-GLP-2 fusion polypeptide comprises SEQ ID NO: 538. In other specific embodiments, the PhoA-GLP-2 fusion polypeptide consists of SEQ ID NO: 538. In certain embodiments, the PhoA-GLP-2 fusion gene sequence has at least about 80%, 85%, 90%, 95%, or 99% identity with SEQ ID NO: 549. In some embodiments, the PhoA-GLP-2 fusion gene sequence has at least about 85%, 86%, 87%, 88%, 89%, 90%, 91%, 92%, 93%, 94%, 95%, 96%, 97%, 98%, or 99% identity with SEQ ID NO: 549. In some specific embodiments, the PhoA-GLP-2 fusion gene sequence comprises SEQ ID NO: 549. In other specific embodiments, the PhoA-GLP-2 fusion gene sequence consists of SEQ ID NO: 549.

[0202] In some embodiments, the genetically engineered bacteria comprise a GLP-2 fusion protein encoding PhoA-GLP-2-Fc (hIgA). In some embodiments, the recombinant bacteria comprise gene sequence encoding a PhoA-GLP-2-Fc (hIgA) fusion protein which comprises SEQ ID NO: 511 or a functional fragment thereof. In some embodiments, recombinant bacteria comprise a gene sequence encoding a PhoA-GLP-2-Fc (hIgA) polypeptide that is at least about 80%, 85%, 90%, 95%, or 99% identity to PhoA-GLP-2-Fc (hIgA) polypeptide comprising SEQ ID NO: 511 or a functional fragment thereof. In some embodiments, the PhoA-GLP-2-Fc (hIgA) polypeptide has at least about 85%, 86%, 87%, 88%, 89%, 90%, 91%, 92%, 93%, 94%, 95%, 96%, 97%, 98%, or 99% identity with SEQ ID NO: 511. In some specific embodiments, the PhoA-GLP-2-Fc (hIgA) polypeptide comprises SEQ ID NO: 511. In other specific embodiments, the PhoA-GLP-2-Fc (hIgA) polypeptide consists of SEQ ID NO: 511. In some embodiments, the recombinant bacteria comprise gene sequence encoding a GLP-2 fusion protein which comprises SEQ ID NO: 512 or a functional fragment thereof. In some embodiments, recombinant bacteria comprise a gene sequence encoding a polypeptide that is at least about 80%, 85%, 90%, 95%, or 99% identity to polypeptide comprising SEQ ID NO: 512 or a functional fragment thereof. In some embodiments, the polypeptide has at least about 85%, 86%, 87%, 88%, 89%, 90%, 91%, 92%, 93%, 94%, 95%, 96%, 97%, 98%, or 99% identity with SEQ ID NO: 512. In some specific embodiments, the polypeptide comprises SEQ ID NO: 512. In other specific embodiments, the polypeptide consists of SEQ ID NO: 512.

[0203] In certain embodiments, the PhoA-GLP-2-Fc (hIgA) gene sequence has at least about 80%, 85%, 90%, 95%, or 99% identity with SEQ ID NO: 529. In some embodiments, the PhoA-GLP-2-Fc (hIgA) gene sequence has at least about 85%, 86%, 87%, 88%, 89%, 90%, 91%, 92%, 93%, 94%, 95%, 96%, 97%, 98%, or 99% identity with SEQ ID NO: 529. In some specific embodiments, the PhoA-GLP-2-Fc (hIgA) gene sequence comprises SEQ ID NO: 529. In other specific embodiments, the PhoA-GLP-2-Fc (hIgA) gene sequence consists of SEQ ID NO: 529.

[0204] In certain embodiments, the PhoA-GLP-2-Fc (hIgA) gene sequence has at least about 80%, 85%, 90%, 95%, or 99% identity with SEQ ID NO: 528. In some embodiments, the PhoA-GLP-2-Fc (hIgA) gene sequence has at least about 85%, 86%, 87%, 88%, 89%, 90%, 91%, 92%, 93%, 94%, 95%, 96%, 97%, 98%, or 99% identity with SEQ ID NO: 528. In some specific embodiments, the PhoA-GLP-2-Fc (hIgA) gene sequence comprises SEQ ID NO: 528. In other specific embodiments, the PhoA-GLP-2-Fc (hIgA) gene sequence consists of SEQ ID NO: 528.

[0205] In certain embodiments, the PhoA-GLP-2-Fc (hIgA) gene sequence has at least about 80%, 85%, 90%, 95%, or 99% identity with SEQ ID NO: 530. In some embodiments, the PhoA-GLP-2-Fc (hIgA) gene sequence has at least about 85%, 86%, 87%, 88%, 89%, 90%, 91%, 92%, 93%, 94%, 95%, 96%, 97%, 98%, or 99% identity with SEQ ID NO: 530. In some specific embodiments, the PhoA-GLP-2-Fc (hIgA) gene sequence comprises SEQ ID NO: 530. In other specific embodiments, the PhoA-GLP-2-Fc (hIgA) gene sequence consists of SEQ ID NO: 530.

[0206] In certain embodiments, the PhoA-GLP-2-Fc (hIgA) gene sequence has at least about 80%, 85%, 90%, 95%, or 99% identity with SEQ ID NO: 531. In some embodiments, the PhoA-GLP-2-Fc (hIgA) gene sequence has at least about 85%, 86%, 87%, 88%, 89%, 90%, 91%, 92%, 93%, 94%, 95%, 96%, 97%, 98%, or 99% identity with SEQ ID NO: 531. In some specific embodiments, the PhoA-GLP-2-Fc (hIgA) gene sequence comprises SEQ ID NO: 531. In other specific embodiments, the PhoA-GLP-2-Fc (hIgA) gene sequence consists of SEQ ID NO: 531.

[0207] In some embodiments, the secretion tag is ECOLIN 19410. In some embodiments, the ECOLIN 19410 secretion tag comprises SEQ ID NO: 397. In some embodiments, the gene sequence encoding ECOLIN 19410 secretion tag comprises SEQ ID NO: 491. In some embodiments, the recombinant bacteria comprise gene sequence encoding a ECOLIN 19410-GLP-2 fusion protein. In some embodiments, the recombinant bacteria comprise gene sequence encoding a ECOLIN 19410-GLP-2 fusion protein which comprises SEQ ID NO: 539 or a functional fragment thereof. In some embodiments, recombinant bacteria comprise a gene sequence encoding a ECOLIN 19410-GLP-2 polypeptide that is at least about 80%, 85%, 90%, 95%, or 99% identity to ECOLIN 19410-GLP-2 polypeptide comprising SEQ ID NO: 539 or a functional fragment thereof. In some embodiments, the ECOLIN 19410-GLP-2 polypeptide has at least about 85%, 86%, 87%, 88%, 89%, 90%, 91%, 92%, 93%, 94%, 95%, 96%, 97%, 98%, or 99% identity with SEQ ID NO: 539. In some specific embodiments, the ECOLIN 19410-GLP-2 polypeptide comprises SEQ ID NO: 539. In other specific embodiments, the ECOLIN 19410-GLP-2 polypeptide consists of SEQ ID NO: 539.

[0208] In certain embodiments, the ECOLIN 19410-GLP-2 fusion protein gene sequence has at least about 80%, 85%, 90%, 95%, or 99% identity with SEQ ID NO: 550. In some embodiments, the ECOLIN 19410-GLP-2 gene sequence has at least about 85%, 86%, 87%, 88%, 89%, 90%, 91%, 92%, 93%, 94%, 95%, 96%, 97%, 98%, or 99% identity with SEQ ID NO: 550. In some specific embodiments, the ECOLIN 19410-GLP-2 gene sequence comprises SEQ ID NO: 550. In other specific embodiments, the ECOLIN 19410-GLP-2 gene sequence consists of SEQ ID NO: 550.

[0209] In some embodiments, the recombinant bacteria comprise a GLP-2 fusion protein encoding ECOLIN 19410-GLP-2-Fc (hIgA). In some embodiments, the recombinant bacteria comprise gene sequence encoding a ECOLIN 19410-GLP-2-Fc (hIgA) protein which comprises SEQ ID NO: 513 or a functional fragment thereof. In some embodiments, recombinant bacteria comprise a gene sequence encoding a ECOLIN 19410-GLP-2-Fc (hIgA) polypeptide that is at least about 80%, 85%, 90%, 95%, or 99% identity to ECOLIN 19410-GLP-2-Fc (hIgA) polypeptide comprising SEQ ID NO: 513 or a functional fragment thereof. In some embodiments, the ECOLIN 19410-GLP-2-Fc (hIgA) polypeptide has at least about 85%, 86%, 87%, 88%, 89%, 90%, 91%, 92%, 93%, 94%, 95%, 96%, 97%, 98%, or 99% identity with SEQ ID NO: 513. In some specific embodiments, the ECOLIN 19410-GLP-2-Fc (hIgA) polypeptide comprises SEQ ID NO: 513. In other specific embodiments, the ECOLIN 19410-GLP-2-Fc (hIgA) polypeptide consists of SEQ ID NO: 513. In certain embodiments, the gene sequence has at least about 80%, 85%, 90%, 95%, or 99% identity with SEQ ID NO: 533. In some embodiments, the ECOLIN 19410-GLP-2-Fc (hIgA) gene sequence has at least about 85%, 86%, 87%, 88%, 89%, 90%, 91%, 92%, 93%, 94%, 95%, 96%, 97%, 98%, or 99% identity with SEQ ID NO: 533. In some specific embodiments, the ECOLIN 19410-GLP-2-Fc (hIgA) gene sequence comprises SEQ ID NO: 533. In other specific embodiments, the ECOLIN 19410-GLP-2-Fc (hIgA) gene sequence consists of SEQ ID NO: 533.

[0210] In certain embodiments, the ECOLIN 19410-GLP-2-Fc (hIgA) ECOLIN 19410-GLP-2-Fc (hIgA) gene sequence has at least about 80%, 85%, 90%, 95%, or 99% identity with SEQ ID NO: 534. In some embodiments, the ECOLIN 19410-GLP-2-Fc (hIgA) gene sequence has at least about 85%, 86%, 87%, 88%, 89%, 90%, 91%, 92%, 93%, 94%, 95%, 96%, 97%, 98%, or 99% identity with SEQ ID NO: 534. In some specific embodiments, the ECOLIN 19410-GLP-2-Fc (hIgA) gene sequence comprises SEQ ID NO: 534. In other specific embodiments, the ECOLIN 19410-GLP-2-Fc (hIgA) gene sequence consists of SEQ ID NO: 534.

[0211] In some embodiments, the recombinant bacteria comprise ECOLIN 19410-GLP-2-Fc (hIgA) gene sequence encoding a ECOLIN 19410-GLP-2-Fc (hIgA) fusion protein. In certain embodiments, the ECOLIN 19410-GLP-2-Fc (hIgA) gene sequence has at least about 80%, 85%, 90%, 95%, or 99% identity with SEQ ID NO: 535. In some embodiments, the ECOLIN 19410-GLP-2-Fc (hIgA) gene sequence has at least about 85%, 86%, 87%, 88%, 89%, 90%, 91%, 92%, 93%, 94%, 95%, 96%, 97%, 98%, or 99% identity with SEQ ID NO: 535. In some specific embodiments, the ECOLIN 19410-GLP-2-Fc (hIgA) gene sequence comprises SEQ ID NO: 535. In other specific embodiments, the ECOLIN 19410-GLP-2-Fc (hIgA) gene sequence consists of SEQ ID NO: 535.

[0212] In certain embodiments, the ECOLIN 19410-GLP-2-Fc (hIgA) gene sequence has at least about 80%, 85%, 90%, 95%, or 99% identity with SEQ ID NO: 536. In some embodiments, the ECOLIN 19410-GLP-2-Fc (hIgA) gene sequence has at least about 85%, 86%, 87%, 88%, 89%, 90%, 91%, 92%, 93%, 94%, 95%, 96%, 97%, 98%, or 99% identity with SEQ ID NO: 536. In some specific embodiments, the ECOLIN 19410-GLP-2-Fc (hIgA) gene sequence comprises SEQ ID NO: 536. In other specific embodiments, the ECOLIN 19410-GLP-2-Fc (hIgA) gene sequence consists of SEQ ID NO: 536.

[0213] In some embodiments, the recombinant bacteria comprise ECOLIN 19410-GLP-2-Fc (hIgA) gene sequence encoding a GLP-2 fusion protein which comprises SEQ ID NO: 514 or a functional fragment thereof. In some embodiments, recombinant bacteria comprise a ECOLIN 19410-GLP-2-Fc (hIgA) gene sequence encoding a polypeptide that is at least about 80%, 85%, 90%, 95%, or 99% identity to polypeptide comprising SEQ ID NO: 514 or a functional fragment thereof. In some embodiments, the polypeptide has at least about 85%, 86%, 87%, 88%, 89%, 90%, 91%, 92%, 93%, 94%, 95%, 96%, 97%, 98%, or 99% identity with SEQ ID NO: 514. In some specific embodiments, the polypeptide comprises SEQ ID NO: 514. In other specific embodiments, the polypeptide consists of SEQ ID NO: 514.

[0214] In some embodiments, the recombinant bacteria are capable of producing GLP-2 analogs, including but not limited to, Gattex and teduglutide. Teduglutide is a protease resistan analog of GLP-2. It is made up of 33 amino acids and differs from GLP-2 by one amino acid (alanine is substituted by glycine). The significance of this substitution is that teduglutide is longer acting than endogenous GLP-2 as it is more resistant to proteolysis from dipeptidyl peptidase-4.

[0215] In some embodiments, the recombinant bacteria comprise a gene sequence encoding SEQ ID NO: 149 or a functional fragment thereof. In some embodiments, recombinant bacteria comprise a nucleic acid sequence that is at least about 80%, 85%, 90%, 95%, or 99% homologous to a nucleic acid sequence encoding SEQ ID NO: 149 or a functional fragment thereof. In certain embodiments, the mutated GLP-2 gene sequence has at least about 80%, 85%, 90%, 95%, or 99% identity with SEQ ID NO: 526. In some embodiments, the mutated GLP-2 gene sequence has at least about 85%, 86%, 87%, 88%, 89%, 90%, 91%, 92%, 93%, 94%, 95%, 96%, 97%, 98%, or 99% identity with SEQ ID NO: 526. In some specific embodiments, the mutated GLP-2 gene sequence comprises SEQ ID NO: 526. In other specific embodiments, the mutated GLP-2 gene sequence consists of SEQ ID NO: 526.

[0216] In one embodiment, a mutated human GLP-2 sequence e.g., of SEQ ID NO: 149 is fused to the N-terminus of the Fc portion of human IgA protein, e.g., SEQ ID NO: 499 linked by a 20 amino acid linker, e.g., SEQ ID NO: 509. In some embodiments, the recombinant bacteria comprise a gene sequence encoding mutated GLP-2. In some embodiments, the recombinant bacteria comprise gene sequence encoding a mutated glp2-linker Fc (IgA) which comprises SEQ ID NO: 540 or a functional fragment thereof. In some embodiments, recombinant bacteria comprise a gene sequence encoding a mutated glp2-linker Fc (IgA) polypeptide that is at least about 80%, 85%, 90%, 95%, or 99% identity to mutated glp2-linker Fc (IgA) polypeptide comprising SEQ ID NO: 540 or a functional fragment thereof. In some embodiments, the mutated glp2-linker Fc (IgA) polypeptide has at least about 85%, 86%, 87%, 88%, 89%, 90%, 91%, 92%, 93%, 94%, 95%, 96%, 97%, 98%, or 99% identity with SEQ ID NO: 540. In some specific embodiments, the mutated glp2-linker Fc (IgA) polypeptide comprises SEQ ID NO: 540. In other specific embodiments, the mutated glp2-linker Fc (IgA) polypeptide consists of SEQ ID NO: 540. In certain embodiments, the mutated glp2-linker Fc (IgA) fusion protein mutated glp2-linker Fc (IgA) gene sequence has at least about 80%, 85%, 90%, 95%, or 99% identity with SEQ ID NO: 559. In some embodiments, the mutated glp2-linker Fc (IgA) gene sequence has at least about 85%, 86%, 87%, 88%, 89%, 90%, 91%, 92%, 93%, 94%, 95%, 96%, 97%, 98%, or 99% identity with SEQ ID NO: 559. In some specific embodiments, the mutated glp2-linker Fc (IgA) gene sequence comprises SEQ ID NO: 559. In other specific embodiments, the mutated glp2-linker Fc (IgA) gene sequence consists of SEQ ID NO: 559.

[0217] In certain embodiments, the mutated glp2-linker Fc (IgA) fusion protein mutated glp2-linker Fc (IgA) gene sequence has at least about 80%, 85%, 90%, 95%, or 99% identity with SEQ ID NO: 560. In some embodiments, the mutated glp2-linker Fc (IgA) gene sequence has at least about 85%, 86%, 87%, 88%, 89%, 90%, 91%, 92%, 93%, 94%, 95%, 96%, 97%, 98%, or 99% identity with SEQ ID NO: 560. In some specific embodiments, the mutated glp2-linker Fc (IgA) gene sequence comprises SEQ ID NO: 560. In other specific embodiments, the mutated glp2-linker Fc (IgA) gene sequence consists of SEQ ID NO: 560.

[0218] In any of these embodiments, the recombinant bacteria may further comprise gene sequences encoding a secretion tag. Non-limiting examples of such secretion tags are described herein and include PhoA, OmpF, cvaC, TorA, fdnG, dmsA, PelB, the ECOLIN_05715 secretion signal, ECOLIN_16495 secretion signal, ECOLIN_19410 secretion signal, and the ECOLIN_19880 secretion signal. In some embodiments, the secretion tag is PhoA. In some embodiments, the PhoA secretion tag comprises SEQ ID NO: 385. In some embodiments, the PhoA secretion tag comprises SEQ ID NO: 386. In some embodiments, the recombinant bacteria comprise gene sequence encoding a PhoA-mutated GLP-2 fusion protein. In some embodiments, the recombinant bacteria comprise gene sequence encoding a mutated GLP-2 fusion protein which comprises SEQ ID NO: 541 or a functional fragment thereof. In some embodiments, recombinant bacteria comprise a gene sequence encoding a PhoA-mutated GLP-2 polypeptide that is at least about 80%, 85%, 90%, 95%, or 99% identity to PhoA-mutated GLP-2 polypeptide comprising SEQ ID NO: 541 or a functional fragment thereof. In some embodiments, the PhoA-mutated GLP-2 polypeptide has at least about 85%, 86%, 87%, 88%, 89%, 90%, 91%, 92%, 93%, 94%, 95%, 96%, 97%, 98%, or 99% identity with SEQ ID NO: 541. In some specific embodiments, the PhoA-mutated GLP-2 polypeptide comprises SEQ ID NO: 541. In other specific embodiments, the PhoA-mutated GLP-2 polypeptide consists of SEQ ID NO: 541. In some embodiments, the recombinant bacteria comprise gene sequence encoding a PhoA-mutated GLP-2 fusion protein. In certain embodiments, the PhoA-mutated GLP-2 fusion protein gene sequence has at least about 80%, 85%, 90%, 95%, or 99% identity with SEQ ID NO: 561. In some embodiments, the PhoA-mutated GLP-2 gene sequence has at least about 85%, 86%, 87%, 88%, 89%, 90%, 91%, 92%, 93%, 94%, 95%, 96%, 97%, 98%, or 99% identity with SEQ ID NO: 561. In some specific embodiments, the PhoA-mutated GLP-2 gene sequence comprises SEQ ID NO: 561. In other specific embodiments, the PhoA-mutated GLP-2 gene sequence consists of SEQ ID NO: 561.

[0219] In some embodiments, the genetically engineered bacteria comprise a mutated GLP-2 fusion protein encoding PhoA-GLP-2-Fc (hIgA). In some embodiments, the recombinant bacteria comprise gene sequence encoding a mutated GLP-2 fusion protein which comprises SEQ ID NO: 543 or a functional fragment thereof. In some embodiments, recombinant bacteria comprise a gene sequence encoding a PhoA-GLP-2-Fc (hIgA) polypeptide that is at least about 80%, 85%, 90%, 95%, or 99% identity to PhoA-GLP-2-Fc (hIgA) polypeptide comprising SEQ ID NO: 543 or a functional fragment thereof. In some embodiments, the PhoA-GLP-2-Fc (hIgA) polypeptide has at least about 85%, 86%, 87%, 88%, 89%, 90%, 91%, 92%, 93%, 94%, 95%, 96%, 97%, 98%, or 99% identity with SEQ ID NO: 543. In some specific embodiments, the PhoA-GLP-2-Fc (hIgA) polypeptide comprises SEQ ID NO: 543. In other specific embodiments, the PhoA-GLP-2-Fc (hIgA) polypeptide consists of SEQ ID NO: 543.

[0220] In some embodiments, the recombinant bacteria comprise gene sequence encoding a PhoA-GLP-2-Fc (hIgA) fusion protein which comprises SEQ ID NO: 544 or a functional fragment thereof. In some embodiments, recombinant bacteria comprise a gene sequence encoding a PhoA-GLP-2-Fc (hIgA) polypeptide that is at least about 80%, 85%, 90%, 95%, or 99% identity to PhoA-GLP-2-Fc (hIgA) polypeptide comprising SEQ ID NO: 544 or a functional fragment thereof. In some embodiments, the PhoA-GLP-2-Fc (hIgA) polypeptide has at least about 85%, 86%, 87%, 88%, 89%, 90%, 91%, 92%, 93%, 94%, 95%, 96%, 97%, 98%, or 99% identity with SEQ ID NO: 544. In some specific embodiments, the PhoA-GLP-2-Fc (hIgA) polypeptide comprises SEQ ID NO: 544. In other specific embodiments, the PhoA-GLP-2-Fc (hIgA) polypeptide consists of SEQ ID NO: 544.

[0221] In certain embodiments, the a PhoA-mutated GLP-2-Fc (hIgA) fusion protein gene sequence has at least about 80%, 85%, 90%, 95%, or 99% identity with SEQ ID NO: 551. In some embodiments, the PhoA-mutated GLP-2-Fc (hIgA) gene sequence has at least about 85%, 86%, 87%, 88%, 89%, 90%, 91%, 92%, 93%, 94%, 95%, 96%, 97%, 98%, or 99% identity with SEQ ID NO: 551. In some specific embodiments, the PhoA-mutated GLP-2-Fc (hIgA) gene sequence comprises SEQ ID NO: 551. In other specific embodiments, the PhoA-mutated GLP-2-Fc (hIgA) gene sequence consists of SEQ ID NO: 551.

[0222] In certain embodiments, the PhoA-mutated GLP-2-Fc (hIgA) fusion protein gene sequence has at least about 80%, 85%, 90%, 95%, or 99% identity with SEQ ID NO: 552. In some embodiments, the PhoA-mutated GLP-2-Fc (hIgA) gene sequence has at least about 85%, 86%, 87%, 88%, 89%, 90%, 91%, 92%, 93%, 94%, 95%, 96%, 97%, 98%, or 99% identity with SEQ ID NO: 552. In some specific embodiments, the PhoA-mutated GLP-2-Fc (hIgA) gene sequence comprises SEQ ID NO: 552. In other specific embodiments, the PhoA-mutated GLP-2-Fc (hIgA) gene sequence consists of SEQ ID NO: 552.

[0223] In certain embodiments, the PhoA-mutated GLP-2-Fc (hIgA) fusion protein gene sequence has at least about 80%, 85%, 90%, 95%, or 99% identity with SEQ ID NO: 553. In some embodiments, the PhoA-mutated GLP-2-Fc (hIgA) gene sequence has at least about 85%, 86%, 87%, 88%, 89%, 90%, 91%, 92%, 93%, 94%, 95%, 96%, 97%, 98%, or 99% identity with SEQ ID NO: 553. In some specific embodiments, the PhoA-mutated GLP-2-Fc (hIgA) gene sequence comprises SEQ ID NO: 553. In other specific embodiments, the PhoA-mutated GLP-2-Fc (hIgA) gene sequence consists of SEQ ID NO: 553.

[0224] In certain embodiments, the PhoA-mutated GLP-2-Fc (hIgA) fusion protein gene sequence has at least about 80%, 85%, 90%, 95%, or 99% identity with SEQ ID NO: 554. In some embodiments, the PhoA-mutated GLP-2-Fc (hIgA) gene sequence has at least about 85%, 86%, 87%, 88%, 89%, 90%, 91%, 92%, 93%, 94%, 95%, 96%, 97%, 98%, or 99% identity with SEQ ID NO: 554. In some specific embodiments, the PhoA-mutated GLP-2-Fc (hIgA) gene sequence comprises SEQ ID NO: 554. In other specific embodiments, the PhoA-mutated GLP-2-Fc (hIgA) gene sequence consists of SEQ ID NO: 554.

[0225] In some embodiments, the secretion tag is ECOLIN 19410. In some embodiments, the ECOLIN 19410 secretion tag comprises SEQ ID NO: 397. In some embodiments, the ECOLIN 19410 secretion tag gene sequence comprises SEQ ID NO: 491.

[0226] In some embodiments, the recombinant bacteria comprise gene sequence encoding a ECOLIN 19410-mutated GLP-2 fusion protein which comprises SEQ ID NO: 542 or a functional fragment thereof. In some embodiments, recombinant bacteria comprise a gene sequence encoding a ECOLIN 19410-mutated GLP-2 polypeptide that is at least about 80%, 85%, 90%, 95%, or 99% identity to ECOLIN 19410-mutated GLP-2 polypeptide comprising SEQ ID NO: 542 or a functional fragment thereof. In some embodiments, the ECOLIN 19410-mutated GLP-2 polypeptide has at least about 85%, 86%, 87%, 88%, 89%, 90%, 91%, 92%, 93%, 94%, 95%, 96%, 97%, 98%, or 99% identity with SEQ ID NO: 542. In some specific embodiments, the ECOLIN 19410-mutated GLP-2 polypeptide comprises SEQ ID NO: 542. In other specific embodiments, the ECOLIN 19410-mutated GLP-2 polypeptide consists of SEQ ID NO: 542. In some embodiments, the gene sequence encoding ECOLIN 19410 secretion tag comprises SEQ ID NO: 491. In some embodiments, the recombinant bacteria comprise gene sequence encoding a ECOLIN 19410-mutated GLP-2 fusion protein. In certain embodiments, the ECOLIN 19410-mutated GLP-2 fusion protein gene sequence has at least about 80%, 85%, 90%, 95%, or 99% identity with SEQ ID NO: 562. In some embodiments, the ECOLIN 19410-mutated GLP-2 gene sequence has at least about 85%, 86%, 87%, 88%, 89%, 90%, 91%, 92%, 93%, 94%, 95%, 96%, 97%, 98%, or 99% identity with SEQ ID NO: 562. In some specific embodiments, the ECOLIN 19410-mutated GLP-2 gene sequence comprises SEQ ID NO: 562. In other specific embodiments, the ECOLIN 19410-mutated GLP-2 gene sequence consists of SEQ ID NO: 562.

[0227] In some embodiments, the recombinant bacteria comprise a GLP-2 fusion protein encoding ECOLIN 19410-GLP-2-Fc (hIgA). In some embodiments, the recombinant bacteria comprise gene sequence encoding a ECOLIN 19410-mutated GLP-2-Fc (hIgA) which comprises SEQ ID NO: 545 or a functional fragment thereof. In some embodiments, recombinant bacteria comprise a gene sequence encoding a ECOLIN 19410-mutated GLP-2-Fc (hIgA) polypeptide that is at least about 80%, 85%, 90%, 95%, or 99% identity to ECOLIN 19410-mutated GLP-2-Fc (hIgA) polypeptide comprising SEQ ID NO: 545 or a functional fragment thereof. In some embodiments, the ECOLIN 19410-mutated GLP-2-Fc (hIgA) polypeptide has at least about 85%, 86%, 87%, 88%, 89%, 90%, 91%, 92%, 93%, 94%, 95%, 96%, 97%, 98%, or 99% identity with SEQ ID NO: 545. In some specific embodiments, the ECOLIN 19410-mutated GLP-2-Fc (hIgA) polypeptide comprises SEQ ID NO: 545. In other specific embodiments, the ECOLIN 19410-mutated GLP-2-Fc (hIgA) polypeptide consists of SEQ ID NO: 545. In some embodiments, the recombinant bacteria comprise gene sequence encoding a GLP-2-Fc (hIgA) fusion protein which comprises SEQ ID NO: 546 or a functional fragment thereof. In some embodiments, recombinant bacteria comprise a gene sequence encoding a polypeptide that is at least about 80%, 85%, 90%, 95%, or 99% identity to -Fc (hIgA) polypeptide comprising SEQ ID NO: 546 or a functional fragment thereof. In some embodiments, the -Fc (hIgA) polypeptide has at least about 85%, 86%, 87%, 88%, 89%, 90%, 91%, 92%, 93%, 94%, 95%, 96%, 97%, 98%, or 99% identity with SEQ ID NO: 546. In some specific embodiments, the -Fc (hIgA) polypeptide comprises SEQ ID NO: 546. In other specific embodiments, the -Fc (hIgA) polypeptide consists of SEQ ID NO: 546.

[0228] In some embodiments, the recombinant bacteria comprise gene sequence encoding a ECOLIN 19410-mutated GLP-2-Fc (hIgA) fusion protein. In certain embodiments, the ECOLIN 19419-mutated GLP-2-Fc (hIgA) gene sequence has at least about 80%, 85%, 90%, 95%, or 99% identity with SEQ ID NO: 555. In some embodiments, the ECOLIN 19419-mutated GLP-2-Fc (hIgA) gene sequence has at least about 85%, 86%, 87%, 88%, 89%, 90%, 91%, 92%, 93%, 94%, 95%, 96%, 97%, 98%, or 99% identity with SEQ ID NO: 555. In some specific embodiments, the ECOLIN 19419-mutated GLP-2-Fc (hIgA) gene sequence comprises SEQ ID NO: 555. In other specific embodiments, the ECOLIN 19419-mutated GLP-2-Fc (hIgA) gene sequence consists of SEQ ID NO: 555.

[0229] In certain embodiments, the ECOLIN 19419-mutated GLP-2-Fc (hIgA) gene sequence has at least about 80%, 85%, 90%, 95%, or 99% identity with SEQ ID NO: 556. In some embodiments, the ECOLIN 19419-mutated GLP-2-Fc (hIgA) gene sequence has at least about 85%, 86%, 87%, 88%, 89%, 90%, 91%, 92%, 93%, 94%, 95%, 96%, 97%, 98%, or 99% identity with SEQ ID NO: 556. In some specific embodiments, the ECOLIN 19419-mutated GLP-2-Fc (hIgA) gene sequence comprises SEQ ID NO: 556. In other specific embodiments, the ECOLIN 19419-mutated GLP-2-Fc (hIgA) gene sequence consists of SEQ ID NO: 556.

[0230] In certain embodiments, the ECOLIN 19419-mutated GLP-2-Fc (hIgA) gene sequence has at least about 80%, 85%, 90%, 95%, or 99% identity with SEQ ID NO: 557. In some embodiments, the ECOLIN 19419-mutated GLP-2-Fc (hIgA) gene sequence has at least about 85%, 86%, 87%, 88%, 89%, 90%, 91%, 92%, 93%, 94%, 95%, 96%, 97%, 98%, or 99% identity with SEQ ID NO: 557. In some specific embodiments, the ECOLIN 19419-mutated GLP-2-Fc (hIgA) gene sequence comprises SEQ ID NO: 557. In other specific embodiments, the ECOLIN 19419-mutated GLP-2-Fc (hIgA) gene sequence consists of SEQ ID NO: 557.

[0231] In certain embodiments, the ECOLIN 19419-mutated GLP-2-Fc (hIgA) gene sequence has at least about 80%, 85%, 90%, 95%, or 99% identity with SEQ ID NO: 558. In some embodiments, the ECOLIN 19419-mutated GLP-2-Fc (hIgA) gene sequence has at least about 85%, 86%, 87%, 88%, 89%, 90%, 91%, 92%, 93%, 94%, 95%, 96%, 97%, 98%, or 99% identity with SEQ ID NO: 558. In some specific embodiments, the ECOLIN 19419-mutated GLP-2-Fc (hIgA) gene sequence comprises SEQ ID NO: 558. In other specific embodiments, the ECOLIN 19419-mutated GLP-2-Fc (hIgA) gene sequence consists of SEQ ID NO: 558

[0232] In any of these embodiments, the recombinant bacteria may further comprise gene sequences encoding a secretion tag. Non-limiting examples of such secretion tags are described herein and include PhoA, OmpF, cvaC, TorA, fdnG, dmsA, PelB, the ECOLIN_05715 secretion signal, ECOLIN_16495 secretion signal, ECOLIN_19410 secretion signal, and the ECOLIN_19880 secretion signal. In some embodiments, the secretion tag is PhoA. In some embodiments, the secretion tag is ECOLIN 19410. The recombinant bacteria may further comprise one or more mutations to outer membrane proteins, i.e., to generate a diffusible outer membrane phenotype (DOM). Non-limiting examples of such outer membrane proteins are described herein and include lpp, nlP, tolA, and PAL. In one embodiment, the recombinant bacteria comprise a deletion or mutation in PAL.

[0233] In some embodiments, the genetically engineered are capable of producing and secreting GLP-2. In some embodiments, the GLP-2 gene is functionally replaced, modified, and/or mutated in order to enhance stability and/or increase GLP-2 production or secretion. In some embodiments, the recombinant bacteria are capable of expressing and secreting GLP-2 in low-oxygen conditions, in the presence of certain molecules or metabolites, in the presence of molecules or metabolites associated with inflammation or an inflammatory response, or in the presence of some other metabolite that may or may not be present in the gut, such as arabinose. Exemplary chemical inducers are described herein.

[0234] In one embodiment, the GLP-2 gene is directly operably linked to a first promoter. In another embodiment, the GLP-2 gene is indirectly operably linked to a first promoter. In one embodiment, the promoter is not operably linked with the GLP-2 gene in nature.

[0235] In some embodiments, the GLP-2 gene is expressed under the control of a constitutive promoter. In another embodiment, the GLP-2 gene is expressed under the control of an inducible promoter. In some embodiments, the GLP-2 gene is expressed under the control of a promoter that is directly or indirectly induced by exogenous environmental conditions. In one embodiment, the GLP-2 gene is expressed under the control of a promoter that is directly or indirectly induced by low-oxygen or anaerobic conditions, wherein expression of the GLP-2 gene is activated under low-oxygen or anaerobic environments, such as the environment of the mammalian gut. Inducible promoters are described in more detail infra.

[0236] The GLP-2 gene may be present on a plasmid or chromosome in the bacterial cell. In one embodiment, the GLP-2 gene is located on a plasmid in the bacterial cell. In another embodiment, the GLP-2 gene is located in the chromosome of the bacterial cell. In yet another embodiment, a native copy of the GLP-2 gene is located in the chromosome of the bacterial cell.

[0237] The GLP-2 gene may be expressed on a low-copy plasmid or a high-copy plasmid. In some embodiments, the high-copy plasmid may be useful for increasing expression of GLP-2.

[0238] In any of these embodiments, the recombinant bacteria may comprise gene sequence(s) which encode two separate effector polypeptides covalently linked together through a peptide bond or peptide linker. In one embodiment, the recombinant bacteria may comprise gene sequence(s) which encode GLP-2 covalently linked to IL-22. In one embodiment, the recombinant bacteria may comprise gene sequence(s) which encode GLP-2 joined by a peptide bond or a peptide linker to a first and a second IL-10 monomer, which are joined together by a second peptide bond or peptide linker.

[0239] IL-19, IL-20, and/or IL-24

[0240] In some embodiments, the recombinant bacteria are capable of producing IL-19, IL-20, and/or IL-24. In some embodiments, the recombinant bacteria are capable of producing IL-19, IL-20, and/or IL-24 under inducing conditions, e.g., under a condition(s) associated with inflammation. In some embodiments, the recombinant bacteria are capable of producing IL-19, IL-20 and/or IL-24 in low-oxygen conditions.

[0241] In some embodiments, the recombinant bacteria produce 0% to 2% to 4%, 4% to 6%, 6% to 8%, 8% to 10%, 10% to 12%, 12% to 14%, 14% to 16%, 16% to 18%, 18% to 20%, 20% to 25%, 25% to 30%, 30% to 35%, 35% to 40%, 40% to 45% 45% to 50%, 50% to 55%, 55% to 60%, 60% to 65%, 65% to 70% to 80%, 80% to 90%, or 90% to 100% more IL-2 than unmodified bacteria of the same bacterial subtype under the same conditions. In yet another embodiment, the recombinant bacteria produce 1.0-1.2-fold, 1.2-1.4-fold, 1.4-1.6-fold, 1.6-1.8-fold, 1.8-2-fold, or two-fold more IL-10 IL-2, IL-22, SOD, GLP-2, IL-19, IL-20 and/or IL-24 than unmodified bacteria of the same bacterial subtype under the same conditions. In yet another embodiment, the recombinant bacteria produce three-fold, four-fold, five-fold, six-fold, seven-fold, eight-fold, nine-fold, ten-fold, fifteen-fold, twenty-fold, thirty-fold, forty-fold, or fifty-fold, more IL-10 IL-2, IL-22, SOD, GLP-2, IL-19, IL-20, and/or IL-24 than unmodified bacteria of the same bacterial subtype under the same conditions.

[0242] CD47-SIRPα Pathway

[0243] CD47 is a cell surface molecule implicated in cell migration and T cell and dendritic cell activation. In addition, CD47 functions as an inhibitor of phagocytosis through ligation of signal-regulatory protein alpha (SIRPα) expressed on phagocytes, leading to tyrosine phosphatase activation and inhibition of myosin accumulation at the submembrane assembly site of the phagocytic synapse. Loss of CD47 leads to homeostatic phagocytosis of aged or damaged cells.

[0244] Elevated levels of CD47 expression are observed on multiple human tumor types, allowing tumors to escape the innate immune system through evasion of phagocytosis. This process occurs through binding of CD47 on tumor cells to SIRPα on phagocytes, thus promoting inhibition of phagocytosis and tumor survival.

[0245] Anti-CD47 antibodies have demonstrated pre-clinical activity against many different human cancers both in vitro and in mouse xenotransplantation models (Chao et al., Curr Opin Immunol. 2012; 24(2): 225-232). In addition to CD47, SIRPα can also be targeted as a therapeutic strategy; for example, anti-SIRPα antibodies administered in vitro caused phagocytosis of tumor cells by macrophages.

[0246] CD47-targeted therapies have been developed using the single 14 kDa CD47 binding domain of human SIRPα (a soluble form without the transmembrane portion) as a competitive antagonist to human CD47 (as described in Weiskopf et al., Science. 2013; 341(6141): the contents of which is herein incorporated by reference in its entirety). Because the wild type SIRPα showed relatively low affinity to CD47, mutated SIRPα were generated through in vitro evolution via yeast surface display, which were shown to act as strong binders and antagonists of CD47. These variant include CV1 (consensus variant 1) and high-affinity variant FD6, and Fc fusion proteins of these variants. The amino acid changes leading to the increased affinity are located in the dl domain of human SIRPα. Non-limiting examples of SIRPalpha variants are also described in WO/2013/109752, the contents of which is herein incorporated by reference in its entirety.

[0247] In certain embodiments, the recombinant bacteria produce one or more anti-cancer molecules that inhibit CD47 and/or inhibit SIRPα and/or inhibit or prevent the interaction between CD47 and SIRPα expressed on macrophages. For example, the genetically engineered microorganism may encode an antibody directed against CD47 and/or an antibody directed against SIRPα, e.g. a single-chain antibody against CD47 and/or a single-chain antibody against SIRPα. In another non-limiting example, the genetically engineered microorganism may encode a competitive antagonist polypeptide comprising the SIRPα CD47 binding domain Such a competitive antagonist polypeptide can function through competitive binding of CD47, preventing the interaction of CD47 with SIRPα expressed on macrophages. In some embodiments, the competitive antagonist polypeptide is soluble, e.g., is secreted from the microorganism. In some embodiments, the competitive antagonist polypeptide is displayed on the surface of the microorganism. In some embodiments, the genetically engineered microorganism encoding the competitive antagonist polypeptide encodes a wild type form of the SIRPα CD47 binding domain. In some embodiments, the genetically engineered microorganism encoding the competitive antagonist polypeptide encodes a mutated or variant form of the SIRPα CD47 binding domain. In some embodiments, the variant form is the CV1 SIRPα variant. In some embodiments, the variant form is the FD6 variant. In some embodiments, the SIRPα variant is a variant described in Weiskopf et al., and/or International Patent Publication WO/2013/109752. In some embodiments, the genetically engineered microorganism encoding the competitive antagonist polypeptide encodes a SIRPα CD47 binding domain or variant thereof fused to a stabilizing polypeptide. In some embodiments, the genetically engineered microorganism encoding the competitive antagonist polypeptide encodes a wild type form of the SIRPα CD47 binding domain fused to a stabilizing polypeptide. In a non-limiting example, the stabilizing polypeptide fused to the wild type SIRPα CD47 binding domain polypeptide is a Fc portion. In some embodiments, the stabilizing polypeptide fused to the wild type SIRPα CD47 binding domain polypeptide is the IgG Fc portion. In some embodiments, the stabilizing polypeptide fused to the wild type SIRPα CD47 binding domain polypeptide is the IgG4 Fc portion. In some embodiments, the genetically engineered microorganism encoding the competitive antagonist polypeptide encodes a mutated or variant form of the SIRPα CD47 binding domain fused to a stabilizing polypeptide. In some embodiments, the variant form fused to the stabilizing polypeptide is the CV1 SIRPα variant. In some embodiments, the variant form fused to the stabilizing polypeptide is the F6 variant. In some embodiments, the SIRPα variant fused to the stabilizing polypeptide is a variant described in Weiskopf et al., and/or International Patent Publication WO/2013/109752. In a non-limiting example, the stabilizing polypeptide fused to the variant SIRPα CD47 binding domain polypeptide is a Fc portion. In some embodiments, the stabilizing polypeptide fused to the variant SIRPα CD47 binding domain polypeptide is the IgG Fc portion. In some embodiments, the stabilizing polypeptide fused to the variant SIRPα CD47 binding domain polypeptide is an IgG4 Fc portion.

[0248] In some embodiments, the recombinant bacterium is a tumor-targeting bacterium that expresses an anti-CD47 antibody and/or anti-SIRPα antibody, e.g., a single chain antibody. In some embodiments, the recombinant bacterium is a tumor-targeting bacterium that expresses competitive antagonist SIRPα CD47 binding domain (WT or mutated to improve CD47 affinity). In some embodiments, the recombinant bacterium is a tumor-targeting bacterium that expresses an anti-CD47 antibody and/or anti-SIRPα antibody, e.g., a single chain antibody, under the control of a promoter that is activated by low-oxygen conditions. In some embodiments, the recombinant bacterium expresses a competitive antagonist SIRPα CD47 binding domain (WT or mutated variant with improved CD47 affinity) under the control of a promoter that is activated by low-oxygen conditions. In some embodiments, the recombinant bacterium expresses an anti-CD47 antibody and/or an anti-SIRPα, e.g., single chain antibody, under the control of a promoter that is activated by hypoxic conditions, or by inflammatory conditions, such as any of the promoters activated by said conditions and described herein. In some embodiments, the recombinant bacterium expresses a competitive antagonist SIRPα CD47 binding domain (WT or mutated variant with improved CD47 affinity) under the control of a promoter that is activated by hypoxic conditions, or by inflammatory conditions, such as any of the promoters activated by said conditions and described herein. In some embodiments, the recombinant bacteria expresses an anti-CD47 antibody and/or an anti-SIRPα antibody, e.g., single chain antibody, under the control of a cancer-specific promoter, a tissue-specific promoter, or a constitutive promoter, such as any of the promoters described herein. In some embodiments, the recombinant bacterium expresses a competitive antagonist SIRPα CD47 binding domain (WT or mutated variant with improved CD47 affinity) under the control of a cancer-specific promoter, a tissue-specific promoter, or a constitutive promoter, such as any of the promoters described herein. In any of these embodiments, the genetically engineered bacteria may also produce one or more anti-cancer molecules that are capable of stimulating Fc-mediated functions such as ADCC, and/or M-CSF and/or GM-CSF, resulting in a blockade of phagocytosis inhibition.

[0249] The recombinant bacteria may comprise any suitable anti-CD47 antibody, anti-SIRPα antibody or competitive SIRPα CD47 binding domain polypeptide (wild type or mutated variant with improved CD47 binding affinity) for the inhibition or prevention of the CD47-SIRPα interaction. In some embodiments, the antibody(ies) or competitive polypeptide(s) is modified and/or mutated, e.g., to enhance stability or increase CD47 antagonism.

[0250] In some embodiments, the recombinant bacteria are capable of expressing any one or more of the described circuits in low-oxygen conditions, and/or in the presence of cancer and/or the tumor microenvironment and/or the tumor microenvironment or tissue specific molecules or metabolites, and/or in the presence of molecules or metabolites associated with inflammation or immune suppression, and/or in the presence of metabolites that may be present in the gut or the tumor, and/or in the presence of metabolites that may or may not be present in vivo, and may be present in vitro during strain culture, expansion, production and/or manufacture, such as arabinose and others described herein. In some embodiments, the gene sequences(s) are controlled by a promoter inducible by such conditions and/or inducers. In some embodiments, the gene sequences(s) are controlled by a constitutive promoter, as described herein. In some embodiments, the gene sequences(s) are controlled by a constitutive promoter, and are expressed in in vivo conditions and/or in vitro conditions, e.g., during bacteria expansion, production and/or manufacture, as described herein.

[0251] IL-15

[0252] IL-15 displays pleiotropic functions in homeostasis of both innate and adaptive immune system and binds to IL-15 receptor, a heterotrimeric receptor composed of three subunits. The alpha subunit is specific for IL-15, while beta (CD122) and gamma (CD132) subunits are shared with the IL-2 receptor, and allow shared signaling through the JAK/STAT pathways. IL-15 is produced by several cell types, including dendritic cells, monocytes and macrophages. Co-expression of IL-15Rα and IL-15 produced in the same cell, allows intracellular binding of IL-15 to IL-15Rα, which is then shuttled to the cell surface as a complex. Once on the cell surface, then, the IL-15Rα of these cells is able to trans-present IL-15 to IL-15Rβ-γc of CD8 T cells, NK cells, and NK-T cells, which do not express IL-15, inducing the formation of the so-called immunological synapse. Murine and human IL-15Rα, exists both in membrane bound, and also in a soluble form. Soluble IL-15Rα (sIL-15Rα) is constitutively generated from the transmembrane receptor through proteolytic cleavage. IL-15 is critical for lymphoid development and peripheral maintenance of innate immune cells and immunological memory of T cells, in particular natural killer (NK) and CD8+ T cell populations. In contrast to IL-2, IL-15 does not promote the maintenance of Tregs and furthermore, IL-15 has been shown to protect effector T cells from IL-2-mediated activation-induced cell death.

[0253] Consequently, delivery of IL-15 is considered a promising strategy for long-term anti-tumor immunity. In a first-in-human clinical trial of recombinant human IL-15, a 10-fold expansion of NK cells and significantly increased the proliferation of 76T cells and CD8+ T cells was observed upon treatment. In addition, IL-15 suparagonists containing cytokine-receptor fusion complexes have been developed and are evaluated to increase the length of the response. These include the L-15 N72D superagonist/IL-15RαSushi-Fc fusion complex (IL-15SA/IL-15RαSu-Fc; ALT-803) (Kim et al., 2016) markedly enhances specific subpopulations of NK and memory CD8+ T cells, and mediates potent anti-tumor activity against murine breast and colon carcinomas). Thus, in some embodiments, the engineered bacteria is engineered to produce IL-15.

[0254] The biological activity of IL-15 is greatly improved by pre-associating IL-15 with a fusion protein IL-15Rα-Fc or by direct fusion with the sushi domain of IL-15Rα (hyper-IL-15) to mimic trans-presentation of IL-15 by cell-associated IL-15Rα. IL-15, either administrated alone or as a complex with IL-15Rα, exhibits potent antitumor activities in animal models (Cheng et al., Immunotherapy of metastatic and autochthonous liver cancer with IL-15/IL-15Rα fusion protein; Oncoimmunology. 2014; 3(11): e963409, and references therein)

[0255] In some embodiments, the engineered bacteria comprise sequence to encode IL-15. In some embodiments, the engineered bacteria are engineered to over-express IL-15, for example, operatively linked to a strong promoter and/or comprising more than one copy of the IL-15 gene sequence. In some embodiments, the engineered bacteria comprise sequence(s) encoding two or more copies of IL-15 gene, e.g., two, three, four, five, six or more copies of IL-15 gene. In some embodiments, the engineered bacteria produce one or more anti-cancer molecules that stimulate the production of IL-15. In some embodiments, the engineered bacteria comprise sequence to encode IL-15Rα. In some embodiments, the engineered bacteria comprise sequence to encode IL-15 and sequence to encode IL-15Rα. In some embodiments, the engineered bacteria comprise sequence to encode a fusion polypeptide comprising IL-15 and IL-15Rα. In some embodiments, the engineered bacteria comprise sequence(s) to encode IL-15 and sequence to encode a secretory peptide(s) for the secretion of IL-15. The recombinant bacteria is a tumor-targeting bacterium. The recombinant bacterium expresses IL-15 and/or expresses secretory peptides under the control of a promoter that is activated by low-oxygen conditions, by hypoxic conditions, or by inflammatory conditions, such as any of the promoters activated by said conditions and described herein. In some embodiments, the recombinant bacteria expresses IL-15 and/or expresses secretory peptide(s), under the control of a cancer-specific promoter, a tissue-specific promoter, or a constitutive promoter, such as any of the promoters described herein.

[0256] In some embodiments, the genetically engineered bacteria are capable of expressing any one or more of the described IL-15 circuits in low-oxygen conditions, and/or in the presence of cancer and/or in the tumor microenvironment, or tissue specific molecules or metabolites, and/or in the presence of molecules or metabolites associated with inflammation or immune suppression, and/or in the presence of metabolites that may be present in the gut, and/or in the presence of metabolites that may or may not be present in vivo, and may be present in vitro during strain culture, expansion, production and/or manufacture, such as arabinose and others described herein. In some embodiments, the gene sequences(s) encoding IL-15 are controlled by a promoter inducible by such conditions and/or inducers. In some embodiments, the gene sequences(s) encoding IL-15 are controlled by a constitutive promoter, as described herein. In some embodiments, the gene sequences(s) are controlled by a constitutive promoter, and are expressed in in vivo conditions and/or in vitro conditions, e.g., during expansion, production and/or manufacture, as described herein.

[0257] In some embodiments, any one or more of the described genes sequences encoding IL-15 are present on one or more plasmids (e.g., high copy or low copy) or are integrated into one or more sites in the microorganisms chromosome.

[0258] IL-12

[0259] Interleukin 12 (IL-12) is a cytokine, the actions of which create an interconnection between the innate and adaptive immunity. IL-12 is secreted by a number of immune cells, including activated dendritic cells, monocytes, macrophages, and neutrophils, as well as other cell types. IL-12 is a heterodimeric protein (IL-12-p70; IL-12-p35/p40) consisting of p35 and p40 subunits, and binds to a receptor composed of two subunits, IL-12R-131 and IL-12R-β2. IL-12 receptor is expressed constitutively or inducibly on a number of immune cells, including NK cells, T, and B lymphocytes. Upon binding of IL-12, the receptor is activated and downstream signaling through the JAK/STAT pathway initiated, resulting in the cellular response to IL-12. IL-12 acts by increasing the production of IFN-γ, which is the most potent mediator of IL-12 actions, from NK and T cells. In addition, IL-12 promotes growth and cytotoxicity of activated NK cells, CD8+ and CD4+ T cells, and shifts the differentiation of CD4+Th0 cells toward the Th1 phenotype. Further, IL-12 enhances of antibody-dependent cellular cytotoxicity (ADCC) against tumor cells and the induction of IgG and suppression of IgE production from B cells. In addition, IL-12 also plays a role in reprogramming of myeloid-derived suppressor cells, directs the Th1-type immune response and helps increase expression of MHC class I molecules (e.g., reviewed in Waldmann et al., Cancer Immunol Res March 2015 3; 219).

[0260] Thus, in some embodiments, the engineered bacteria are engineered to produce IL-12. In some embodiments, the engineered bacteria comprise sequence to encode IL-12. In some embodiments, the engineered bacteria are engineered to over-express IL-12, for example, operatively linked to a strong promoter and/or comprising more than one copy of the IL-12 gene sequence. In some embodiments, the engineered bacteria comprise sequence(s) encoding two or more copies of IL-12, e.g., two, three, four, five, six or more copies of IL-12 gene. In some embodiments, the engineered bacteria produce one or more anti-cancer molecules that stimulate the production of IL-12. In some embodiments, the engineered bacteria comprise sequence to encode IL-12 and sequence to encode a secretory peptide(s) for the secretion of IL-12. The recombinant bacteria may be a tumor-targeting bacterium. The recombinant bacterium expresses IL-12 and/or expresses secretory peptides under the control of a promoter that is activated by low-oxygen conditions, by hypoxic conditions, or by inflammatory conditions, such as any of the promoters activated by said conditions and described herein. In some embodiments, the recombinant bacteria expresses IL-12 and/or expresses secretory peptide(s), under the control of a cancer-specific promoter, a tissue-specific promoter, or a constitutive promoter, such as any of the promoters described herein.

### Inducible Regulatory Regions

[0261] In some embodiments, the bacterial cell comprises a stably maintained plasmid or chromosome carrying the gene(s) encoding payload (s), such that the payload(s) can be expressed in the host cell, and the host cell is capable of survival and/or growth in vitro, e.g., in medium, and/or in vivo, e.g., in the gut. In some embodiments, bacterial cell comprises two or more distinct payloads or operons, e.g., two or more payload genes. In some embodiments, bacterial cell comprises three or more distinct transporters or operons, e.g., three or more payload genes. In some embodiments, bacterial cell comprises 4, 5, 6, 7, 8, 9, 10, or more distinct payloads or operons, e.g., 4, 5, 6, 7, 8, 9, 10, or more payload genes.

[0262] Herein the terms “payload” “polypeptide of interest” or “polypeptides of interest”, “protein of interest”, “proteins of interest”, “payloads” “effector molecule”, “effector” refers to one or more effector molecules described herein and/or one or more enzyme(s) or polypeptide(s) function as enzymes for the production and secretion of such effector molecules.

[0263] Non-limiting examples of payloads include effector molecules, therapeutic polypeptides, anti-inflammation and/or gut barrier function enhancer molecule(s), including but not limited to, cytokines and growth factors, e.g., IL10, IL-2, IL-22, IL-27, IL-20, IL-24, IL-19, SOD, and GLP2. Non-limiting examples of payloads include cytokines and growth factors selected from IL-2, IL-15, IL-12, IL-7, IL-21, IL-18, TNF, and interferon gamma (IFN-gamma), GMCSF. In some embodiments, payloads include CXCL10, CXCL9, SIRPalpha soluble form. Non-limiting examples of payloads include, TLR agonists, for example, one or more TLR1 agonists, TLR2 agonists, TLR3 agonists, TLR4 agonists, TLR5 agonists, TLR6 agonists, TLR7 agonists, TLR8 agonists, TLR9 agonists, and TRL10 agonists. In some embodiments, the payloads are enzymes, which can be secreted. Non-limiting examples of such enzymes include hyaluronidase, bile salt hydrolase, kynureninase. In some embodiments, the effector molecules are antibodies, such as single chain antibodies. Non-limiting examples of such antibodies include Anti-CD47, Anti-VEGF, anti-HIF, anti-NRP1 antibody, anti-NRP2 antibody, anti-semaphorin3A antibody, anti-CXCR4, anti-CXCL12, anti-Galectin-3 antibody, an anti-Galectin-1 antibody, anti-Tie-2 antibody, anti-Ang1 antibody, anti-Ang4 antibody, anti-VEGFR-2 antibody, Anti-Phosphatidylserine. In some embodiments, the effectors are checkpoint inhibitors. Non-limiting examples of checkpoint inhibitors include antibodies directed against CTLA-4, PD-1, PD-L1, PD-L2, TIGIT, VISTA, LAG-3, TIM1, TIM3, CEACAM1, LAIR-1, HVEM, BTLA, CD160, CD200, CD200R, CD39, CD73, B7-H3, B7-H4, IDO, TDO, KIR, and A2aR. In some embodiments, the effectors are lytic peptides (natural peptides which can lyse cells, e.g. tumor cells) or cytotoxic peptides. As used herein, the term “polypeptide of interest” or “polypeptides of interest”, “protein of interest”, “proteins of interest”, “payload”, “payloads” further includes any or a plurality of any of the effector molecules. Such effectors may be anti-inflammation and/or gut barrier function enhancer molecule(s) or proinflammatory and/or anti-cancer molecules. As used herein, the term “gene of interest” or “gene sequence of interest” includes any or a plurality of any of the gene(s) an/or gene sequence(s) and or gene cassette(s) encoding one or more anti-inflammation and/or gut barrier function enhancer molecule(s) described herein.

[0264] Additional effector molecules, e.g., therapeutic polypeptides, which can be secreted are described in PCT/US2017/013072, filed Jan. 11, 2017; PCT/US2017/016609, filed Feb. 3, 2017; PCT/US2016/039444, filed Jun. 24, 2016; PCT/US2016/069052, filed Dec. 28, 2016; PCT/US2017/012946, filed Jan. 11, 2017; PCT/US2017/017552, filed Feb. 10, 2017; PCT/US2017/017563, filed Feb. 10, 2017, the contents of which is herein incorporated by reference in its entirety.

[0265] In some embodiments, the recombinant bacteria comprise multiple copies of the same payload gene(s). In some embodiments, the gene encoding the payload is present on a plasmid and operably linked to a directly or indirectly inducible promoter. In some embodiments, the gene encoding the payload is present on a plasmid and operably linked to a constitutive promoter. In some embodiments, the gene encoding the payload is present on a plasmid and operably linked to a promoter that is induced under low-oxygen or anaerobic conditions. In some embodiments, the gene encoding the payload is present on plasmid and operably linked to a promoter that is induced by exposure to tetracycline or arabinose, or another chemical or nutritional inducer described herein.

[0266] In some embodiments, the gene encoding the payload is present on a chromosome and operably linked to a directly or indirectly inducible promoter. In some embodiments, the gene encoding the payload is present on a chromosome and operably linked to a constitutive promoter. In some embodiments, the gene encoding the payload is present in the chromosome and operably linked to a promoter that is induced under low-oxygen or anaerobic conditions. In some embodiments, the gene encoding the payload is present on chromosome and operably linked to a promoter that is induced by exposure to tetracycline or arabinose, or another chemical or nutritional inducer described herein.

[0267] In some embodiments, the recombinant bacteria comprise two or more payloads, all of which are present on the chromosome. In some embodiments, the recombinant bacteria comprise two or more payloads, all of which are present on one or more same or different plasmids. In some embodiments, the recombinant bacteria comprise two or more payloads, some of which are present on the chromosome and some of which are present on one or more same or different plasmids.

[0268] In any of the nucleic acid embodiments described above, the one or more payload(s) for producing the effector molecules, or the therapeutic polypeptides, are operably linked to one or more directly or indirectly inducible promoter(s). In some embodiments, the one or more payload(s) are operably linked to a directly or indirectly inducible promoter that is induced under exogenous environmental conditions, e.g., conditions found in the gut, e.g., induced by metabolites found in the gut, or other specific conditions. In some embodiments, the one or more payload(s) are operably linked to a directly or indirectly inducible promoter that is induced under low-oxygen or anaerobic conditions or induced under inflammatory conditions (e.g., RNS, ROS), as described herein. In some embodiments, the one or more payload(s) are operably linked to a directly or indirectly inducible promoter that is induced under immunosuppressive conditions, e.g., as found in the tumor, as described herein. In some embodiments, the two or more gene sequence(s) are linked to a directly or indirectly inducible promoter that is induced by exposure a chemical or nutritional inducer, which may or may not be present under in vivo conditions and which may be present during in vitro conditions (such as strain culture, expansion, manufacture), such as tetracycline or arabinose, or others described herein. In some embodiments, the two or more payloads are all linked to a constitutive promoter, as described herein.

[0269] In some embodiments, the promoter is induced under in vivo conditions, e.g., the gut, as described herein. In some embodiments, the promoters is induced under in vitro conditions, e.g., various cell culture and/or cell manufacturing conditions, as described herein.

[0270] In some embodiments, the promoter that is operably linked to the gene encoding the payload is directly induced by exogenous environmental conditions (e.g., in vivo and/or in vitro and/or production/manufacturing conditions).

[0271] In some embodiments, the promoter is directly or indirectly induced by exogenous environmental conditions specific to the gut of a mammal, e.g., to the small intestine of a mammal. In some embodiments, the promoter is directly or indirectly induced by low-oxygen or anaerobic conditions such as the environment of the mammalian gut. In some embodiments, the promoter is directly or indirectly induced by molecules or metabolites that are specific to the tumor, a particular tissue or the gut of a mammal. In some embodiments, the promoter is directly or indirectly induced by a molecule that is co-administered with the bacterial cell.

[0272] FNR Dependent Regulation

[0273] The recombinant bacteria comprise a gene or gene cassette for producing an effector molecule, or a therapeutic polypeptide, wherein the gene or gene cassette is operably linked to a directly or indirectly inducible promoter that is controlled by exogenous environmental condition(s). In some embodiments, the inducible promoter is an oxygen level-dependent promoter and the effector molecule(s) is expressed in low-oxygen, microaerobic, or anaerobic conditions. For example, in low oxygen conditions, the oxygen level-dependent promoter is activated by a corresponding oxygen level-sensing transcription factor, thereby driving production of the effector molecule(s).

[0274] Bacteria have evolved transcription factors that are capable of sensing oxygen levels. Different signaling pathways may be triggered by different oxygen levels and occur with different kinetics. An oxygen level-dependent promoter is a nucleic acid sequence to which one or more oxygen level-sensing transcription factors is capable of binding, wherein the binding and/or activation of the corresponding transcription factor activates downstream gene expression. In one embodiment, the recombinant bacteria comprise a gene or gene cassette for producing a payload under the control of an oxygen level-dependent promoter. In a more specific aspect, the recombinant bacteria comprise a gene or gene cassette for producing a payload under the control of an oxygen level-dependent promoter that is activated under low-oxygen or anaerobic environments, such as the environment of the mammalian gut.

[0275] In certain embodiments, the bacterial cell comprises a gene encoding a payload expressed under the control of a fumarate and nitrate reductase regulator (FNR) responsive promoter. In E. coli, FNR is a major transcriptional activator that controls the switch from aerobic to anaerobic metabolism (Unden et al., 1997). In the anaerobic state, FNR dimerizes into an active DNA binding protein that activates hundreds of genes responsible for adapting to anaerobic growth. In the aerobic state, FNR is prevented from dimerizing by oxygen and is inactive. Exemplary FNR responsive promoters include, but are not limited to, SEQ ID NO: 151-167. FNR promoter sequences are known in the art, and any suitable FNR promoter sequence(s) may be used in the recombinant bacteria.

[0276] In some embodiments, the recombinant bacteria comprise one or more of: SEQ ID NOS: 151-157, nirB1 promoter (SEQ ID NO: 158), nirB2 promoter (SEQ ID NO: 159), nirB3 promoter (SEQ ID NO: 160), ydfZ promoter (SEQ ID NO: 161), nirB promoter fused to a strong ribosome binding site (SEQ ID NO: 162), ydfZ promoter fused to a strong ribosome binding site (SEQ ID NO: 163), fnrS, an anaerobically induced small RNA gene (fnrS1 promoter SEQ ID NO: 164 or fnrS2 promoter SEQ ID NO: 165), nirB promoter fused to a crp binding site (SEQ ID NO: 166), and fnrS fused to a crp binding site (SEQ ID NO: 167). In some embodiments, the FNR-responsive promoters at least about 80%, 85%, 90%, 95%, or 99% homologous to the sequence of any one of SEQ ID NO: 151-167.

[0277] In some embodiments, multiple distinct FNR nucleic acid sequences are inserted in the recombinant bacteria. In alternate embodiments, the recombinant bacteria comprise a gene encoding a payload expressed under the control of an alternate oxygen level-dependent promoter, e.g., DNR (Trunk et al., 2010) or ANR (Ray et al., 1997). In these embodiments, expression of the payload gene is particularly activated in a low-oxygen or anaerobic environment, such as in the gut, e.g., a mammalian gut, e.g., a human gut. In some embodiments, gene expression is further optimized by methods known in the art, e.g., by optimizing ribosomal binding sites and/or increasing mRNA stability.

[0278] In another embodiment, the recombinant bacteria comprise the gene or gene cassette for producing an effector molecule, or a therapeutic polypeptide, expressed under the control of anaerobic regulation of arginine deiminiase and nitrate reduction transcriptional regulator (ANR). In P. aeruginosa, ANR is “required for the expression of physiological functions which are inducible under oxygen-limiting or anaerobic conditions” (Winteler et al., 1996; Sawers 1991). P. aeruginosa ANR is homologous with E. coli FNR, and “the consensus FNR site (TTGAT----ATCAA) was recognized efficiently by ANR and FNR” (Winteler et al., 1996). Like FNR, in the anaerobic state, ANR activates numerous genes responsible for adapting to anaerobic growth. In the aerobic state, ANR is inactive. Pseudomonas fluorescens, Pseudomonas putida, Pseudomonas syringae, and Pseudomonas mendocina all have functional analogs of ANR (Zimmermann et al., 1991). Promoters that are regulated by ANR are known in the art, e.g., the promoter of the arcDABC operon (see, e.g., Hasegawa et al., 1998).

[0279] In other embodiments, the one or more gene sequence(s) for producing a payload are expressed under the control of an oxygen level-dependent promoter fused to a binding site for a transcriptional activator, e.g., CRP. CRP (cyclic AMP receptor protein or catabolite activator protein or CAP) plays a major regulatory role in bacteria by repressing genes responsible for the uptake, metabolism, and assimilation of less favorable carbon sources when rapidly metabolizable carbohydrates, such as glucose, are present (Wu et al., 2015). This preference for glucose has been termed glucose repression, as well as carbon catabolite repression (Deutscher, 2008; Görke and Stülke, 2008). In some embodiments, the gene or gene cassette for producing an effector molecule(s) is controlled by an oxygen level-dependent promoter fused to a CRP binding site. In some embodiments, the one or more gene sequence(s) for a payload are controlled by a FNR promoter fused to a CRP binding site. In these embodiments, cyclic AMP binds to CRP when no glucose is present in the environment. This binding causes a conformational change in CRP, and allows CRP to bind tightly to its binding site. CRP binding then activates transcription of the gene or gene cassette by recruiting RNA polymerase to the FNR promoter via direct protein-protein interactions. In the presence of glucose, cyclic AMP does not bind to CRP and transcription of the gene or gene cassette for producing an payload is repressed. In some embodiments, an oxygen level-dependent promoter (e.g., an FNR promoter) fused to a binding site for a transcriptional activator is used to ensure that the gene or gene cassette for producing a payload is not expressed under anaerobic conditions when sufficient amounts of glucose are present, e.g., by adding glucose to growth media in vitro.

[0280] In some embodiments, the recombinant bacteria comprise an oxygen level-dependent promoter from a different species, strain, or substrain of bacteria. In some embodiments, the recombinant bacteria comprise an oxygen level-sensing transcription factor, e.g., FNR, ANR or DNR, from a different species, strain, or substrain of bacteria. In some embodiments, the recombinant bacteria comprise an oxygen level-sensing transcription factor and corresponding promoter from a different species, strain, or substrain of bacteria. The heterologous oxygen-level dependent transcriptional regulator and/or promoter increases the transcription of genes operably linked to said promoter, e.g., one or more gene sequence(s) for producing the payload(s) in a low-oxygen or anaerobic environment, as compared to the native gene(s) and promoter in the bacteria under the same conditions. In certain embodiments, the non-native oxygen-level dependent transcriptional regulator is an FNR protein from N. gonorrhoeae (see, e.g., Isabella et al., 2011). In some embodiments, the corresponding wild-type transcriptional regulator is left intact and retains wild-type activity. In alternate embodiments, the corresponding wild-type transcriptional regulator is deleted or mutated to reduce or eliminate wild-type activity.

[0281] In some embodiments, the recombinant bacteria comprise a wild-type oxygen-level dependent transcriptional regulator, e.g., FNR, ANR, or DNR, and corresponding promoter that is mutated relative to the wild-type promoter from bacteria of the same subtype. The mutated promoter enhances binding to the wild-type transcriptional regulator and increases the transcription of genes operably linked to said promoter, e.g., the gene encoding the payload, in a low-oxygen or anaerobic environment, as compared to the wild-type promoter under the same conditions. In some embodiments, the recombinant bacteria comprise a wild-type oxygen-level dependent promoter, e.g., FNR, ANR, or DNR promoter, and corresponding transcriptional regulator that is mutated relative to the wild-type transcriptional regulator from bacteria of the same subtype. The mutated transcriptional regulator enhances binding to the wild-type promoter and increases the transcription of genes operably linked to said promoter, e.g., the gene encoding the payload, in a low-oxygen or anaerobic environment, as compared to the wild-type transcriptional regulator under the same conditions. In certain embodiments, the mutant oxygen-level dependent transcriptional regulator is an FNR protein comprising amino acid substitutions that enhance dimerization and FNR activity (see, e.g., Moore et al., (2006). In some embodiments, both the oxygen level-sensing transcriptional regulator and corresponding promoter are mutated relative to the wild-type sequences from bacteria of the same subtype in order to increase expression of the payload in low-oxygen conditions.

[0282] In some embodiments, the bacterial cells comprise multiple copies of the endogenous gene encoding the oxygen level-sensing transcriptional regulator, e.g., the FNR gene. In some embodiments, the gene encoding the oxygen level-sensing transcriptional regulator is present on a plasmid. In some embodiments, the gene encoding the oxygen level-sensing transcriptional regulator and the gene encoding the payload are present on different plasmids. In some embodiments, the gene encoding the oxygen level-sensing transcriptional regulator and the gene encoding the payload are present on the same plasmid.

[0283] In some embodiments, the gene encoding the oxygen level-sensing transcriptional regulator is present on a chromosome. In some embodiments, the gene encoding the oxygen level-sensing transcriptional regulator and the gene encoding the payload are present on different chromosomes. In some embodiments, the gene encoding the oxygen level-sensing transcriptional regulator and the gene encoding the payload are present on the same chromosome. In some instances, it may be advantageous to express the oxygen level-sensing transcriptional regulator under the control of an inducible promoter in order to enhance expression stability. In some embodiments, expression of the transcriptional regulator is controlled by a different promoter than the promoter that controls expression of the gene encoding the payload. In some embodiments, expression of the transcriptional regulator is controlled by the same promoter that controls expression of the payload. In some embodiments, the transcriptional regulator and the payload are divergently transcribed from a promoter region

[0284] RNS-Dependent Regulation

[0285] In some embodiments, the recombinant bacteria comprise a gene encoding a payload that is expressed under the control of an inducible promoter. In some embodiments, the recombinant bacterium that expresses a payload under the control of a promoter that is activated by inflammatory conditions. In one embodiment, the gene for producing the payload is expressed under the control of an inflammatory-dependent promoter that is activated in inflammatory environments, e.g., a reactive nitrogen species or RNS promoter.

[0286] As used herein, “reactive nitrogen species” and “RNS” are used interchangeably to refer to highly active molecules, ions, and/or radicals derived from molecular nitrogen. RNS can cause deleterious cellular effects such as nitrosative stress. RNS includes, but is not limited to, nitric oxide (NO.), peroxynitrite or peroxynitrite anion (ONOO—), nitrogen dioxide (·NO2), dinitrogen trioxide (N203), peroxynitrous acid (ONOOH), and nitroperoxycarbonate (ONOOCO2-) (unpaired electrons denoted by). Bacteria have evolved transcription factors that are capable of sensing RNS levels. Different RNS signaling pathways are triggered by different RNS levels and occur with different kinetics.

[0287] As used herein, “RNS-inducible regulatory region” refers to a nucleic acid sequence to which one or more RNS-sensing transcription factors is capable of binding, wherein the binding and/or activation of the corresponding transcription factor activates downstream gene expression; in the presence of RNS, the transcription factor binds to and/or activates the regulatory region. In some embodiments, the RNS-inducible regulatory region comprises a promoter sequence. In some embodiments, the transcription factor senses RNS and subsequently binds to the RNS-inducible regulatory region, thereby activating downstream gene expression. In alternate embodiments, the transcription factor is bound to the RNS-inducible regulatory region in the absence of RNS; in the presence of RNS, the transcription factor undergoes a conformational change, thereby activating downstream gene expression. The RNS-inducible regulatory region may be operatively linked to a gene or genes, e.g., a payload gene sequence(s), e.g., any of the payloads described herein. For example, in the presence of RNS, a transcription factor senses RNS and activates a corresponding RNS-inducible regulatory region, thereby driving expression of an operatively linked gene sequence. Thus, RNS induces expression of the gene or gene sequences.

[0288] Each regulatory region is capable of binding at least one corresponding RNS-sensing transcription factor. Examples of transcription factors that sense RNS and their corresponding RNS-responsive genes, promoters, and/or regulatory regions include, but are not limited to, those shown in Table 6.

TABLE 6
Examples of RNS-sensing transcription
factors and RNS-responsive genes

| | Primarily | |
|---|---|---|
| RNS-sensing | capable of | Examples of responsive genes, |
| transcription factor: | sensing: | promoters, and/or regulatory regions: |
| NsrR | NO | norB, aniA, nsrR, hmpA, ytfE, ygbA, |
| | | hcp, hcr, nrfA, aox |
| NorR | NO | norVW, norR |
| DNR | NO | norCB, nir, nor, nos |

[0289] In some embodiments, the recombinant bacteria comprise a tunable regulatory region that is directly or indirectly controlled by a transcription factor that is capable of sensing at least one reactive nitrogen species. The tunable regulatory region is operatively linked to a gene or genes capable of directly or indirectly driving the expression of a payload, thus controlling expression of the payload relative to RNS levels. For example, the tunable regulatory region is a RNS-inducible regulatory region, and the payload is a payload, such as any of the payloads provided herein; when RNS is present, e.g., in an inflamed tissue, a RNS-sensing transcription factor binds to and/or activates the regulatory region and drives expression of the payload gene or genes. Subsequently, when inflammation is ameliorated, RNS levels are reduced, and production of the payload is decreased or eliminated.

[0290] In some embodiments, the tunable regulatory region is a RNS-inducible regulatory region; in the presence of RNS, a transcription factor senses RNS and activates the RNS-inducible regulatory region, thereby driving expression of an operatively linked gene or genes. In some embodiments, the transcription factor senses RNS and subsequently binds to the RNS-inducible regulatory region, thereby activating downstream gene expression. In alternate embodiments, the transcription factor is bound to the RNS-inducible regulatory region in the absence of RNS; when the transcription factor senses RNS, it undergoes a conformational change, thereby inducing downstream gene expression.

[0291] In some embodiments, the tunable regulatory region is a RNS-inducible regulatory region, and the transcription factor that senses RNS is NorR. NorR “is an NO-responsive transcriptional activator that regulates expression of the norVW genes encoding flavorubredoxin and an associated flavoprotein, which reduce NO to nitrous oxide” (Spiro 2006). The recombinant bacteria may comprise any suitable RNS-responsive regulatory region from a gene that is activated by NorR. Genes that are capable of being activated by NorR are known in the art (see, e.g., Spiro 2006; Vine et al., 2011; Karlinsey et al., 2012). In certain embodiments, the recombinant bacteria comprise a RNS-inducible regulatory region from norVW that is operatively linked to a gene or genes, e.g., one or more payload gene sequence(s). In the presence of RNS, a NorR transcription factor senses RNS and activates to the norVW regulatory region, thereby driving expression of the operatively linked gene(s) and producing the payload(s).

[0292] In some embodiments, the tunable regulatory region is a RNS-inducible regulatory region, and the transcription factor that senses RNS is DNR. DNR (dissimilatory nitrate respiration regulator) “promotes the expression of the nir, the nor and the nos genes” in the presence of nitric oxide (Castiglione et al., 2009). The recombinant bacteria may comprise any suitable RNS-responsive regulatory region from a gene that is activated by DNR. Genes that are capable of being activated by DNR are known in the art (see, e.g., Castiglione et al., 2009; Giardina et al., 2008). In certain embodiments, the recombinant bacteria comprise a RNS-inducible regulatory region from norCB that is operatively linked to a gene or gene cassette, e.g., a butyrogenic gene cassette. In the presence of RNS, a DNR transcription factor senses RNS and activates to the norCB regulatory region, thereby driving expression of the operatively linked gene or genes and producing one or more payloads. In some embodiments, the DNR is Pseudomonas aeruginosa DNR. Any suitable transcriptional regulator that is controlled by exogenous environmental conditions and corresponding regulatory region may be used. Non-limiting examples include ArcA/B, ResD/E, NreA/B/C, and AirSR, and others are known in the art.

[0293] In some embodiments, the tunable regulatory region is a RNS-derepressible regulatory region, and binding of a corresponding transcription factor represses downstream gene expression; in the presence of RNS, the transcription factor no longer binds to the regulatory region, thereby derepressing the operatively linked gene or gene cassette.

[0294] In some embodiments, the tunable regulatory region is a RNS-derepressible regulatory region, and the transcription factor that senses RNS is NsrR. NsrR is “an Rrf2-type transcriptional repressor [that] can sense NO and control the expression of genes responsible for NO metabolism” (Isabella et al., 2009). The recombinant bacteria may comprise any suitable RNS-responsive regulatory region from a gene that is repressed by NsrR. In some embodiments, the NsrR is Neisseria gonorrhoeae NsrR. Genes that are capable of being repressed by NsrR are known in the art (see, e.g., Isabella et al., 2009; Dunn et al., 2010). In certain embodiments, the recombinant bacteria comprise a RNS-derepressible regulatory region from norB that is operatively linked to a gene or genes, e.g., a payload gene or genes. In the presence of RNS, an NsrR transcription factor senses RNS and no longer binds to the norB regulatory region, thereby derepressing the operatively linked a payload gene or genes and producing the encoding a payload(s).

[0295] In some embodiments, it is advantageous for the recombinant bacteria to express a RNS-sensing transcription factor that does not regulate the expression of a significant number of native genes in the bacteria. In some embodiments, the recombinant bacterium expresses a RNS-sensing transcription factor from a different species, strain, or substrain of bacteria, wherein the transcription factor does not bind to regulatory sequences in the recombinant bacterium. In some embodiments, the recombinant bacterium is Escherichia coli, and the RNS-sensing transcription factor is NsrR, e.g., from is Neisseria gonorrhoeae, wherein the Escherichia coli does not comprise binding sites for said NsrR. In some embodiments, the heterologous transcription factor minimizes or eliminates off-target effects on endogenous regulatory regions and genes in the recombinant bacteria.

[0296] In these embodiments, the recombinant bacteria may comprise a two-repressor activation regulatory circuit, which is used to express a payload. The two-repressor activation regulatory circuit comprises a first RNS-sensing repressor and a second repressor, which is operatively linked to a gene or gene cassette, e.g., encoding a payload. In one aspect of these embodiments, the RNS-sensing repressor inhibits transcription of the second repressor, which inhibits the transcription of the gene or gene cassette. Examples of second repressors useful in these embodiments, include, but are not limited to, TetR, C1, and LexA. In the absence of binding by the first repressor (which occurs in the absence of RNS), the second repressor is transcribed, which represses expression of the gene or genes. In the presence of binding by the first repressor (which occurs in the presence of RNS), expression of the second repressor is repressed, and the gene or genes, e.g., a payload gene or genes is expressed.

[0297] A RNS-responsive transcription factor may induce, derepress, or repress gene expression depending upon the regulatory region sequence used in the recombinant bacteria. One or more types of RNS-sensing transcription factors and corresponding regulatory region sequences may be present in recombinant bacteria. In some embodiments, the recombinant bacteria comprise one type of RNS-sensing transcription factor, e.g., NsrR, and one corresponding regulatory region sequence, e.g., from norB. In some embodiments, the recombinant bacteria comprise one type of RNS-sensing transcription factor, e.g., NsrR, and two or more different corresponding regulatory region sequences, e.g., from norB and aniA. In some embodiments, the recombinant bacteria comprise two or more types of RNS-sensing transcription factors, e.g., NsrR and NorR, and two or more corresponding regulatory region sequences, e.g., from norB and norR, respectively. One RNS-responsive regulatory region may be capable of binding more than one transcription factor. In some embodiments, the recombinant bacteria comprise two or more types of RNS-sensing transcription factors and one corresponding regulatory region sequence. Nucleic acid sequences of several RNS-regulated regulatory regions are known in the art (see, e.g., Spiro 2006; Isabella et al., 2009; Dunn et al., 2010; Vine et al., 2011; Karlinsey et al., 2012).

[0298] In some embodiments, the recombinant bacteria comprise a gene encoding a RNS-sensing transcription factor, e.g., the nsrR gene, that is controlled by its native promoter, an inducible promoter, a promoter that is stronger than the native promoter, e.g., the GlnRS promoter or the P(Bla) promoter, or a constitutive promoter. In some instances, it may be advantageous to express the RNS-sensing transcription factor under the control of an inducible promoter in order to enhance expression stability. In some embodiments, expression of the RNS-sensing transcription factor is controlled by a different promoter than the promoter that controls expression of the therapeutic molecule. In some embodiments, expression of the RNS-sensing transcription factor is controlled by the same promoter that controls expression of the therapeutic molecule. In some embodiments, the RNS-sensing transcription factor and therapeutic molecule are divergently transcribed from a promoter region.

[0299] In some embodiments, the recombinant bacteria comprise a gene for a RNS-sensing transcription factor from a different species, strain, or substrain of bacteria. In some embodiments, the recombinant bacteria comprise a RNS-responsive regulatory region from a different species, strain, or substrain of bacteria. In some embodiments, the recombinant bacteria comprise a RNS-sensing transcription factor and corresponding RNS-responsive regulatory region from a different species, strain, or substrain of bacteria. The heterologous RNS-sensing transcription factor and regulatory region may increase the transcription of genes operatively linked to said regulatory region in the presence of RNS, as compared to the native transcription factor and regulatory region from bacteria of the same subtype under the same conditions.

[0300] In some embodiments, the recombinant bacteria comprise a RNS-sensing transcription factor, NsrR, and corresponding regulatory region, nsrR, from Neisseria gonorrhoeae. In some embodiments, the native RNS-sensing transcription factor, e.g., NsrR, is left intact and retains wild-type activity. In alternate embodiments, the native RNS-sensing transcription factor, e.g., NsrR, is deleted or mutated to reduce or eliminate wild-type activity.

[0301] In some embodiments, the recombinant bacteria comprise multiple copies of the endogenous gene encoding the RNS-sensing transcription factor, e.g., the nsrR gene. In some embodiments, the gene encoding the RNS-sensing transcription factor is present on a plasmid. In some embodiments, the gene encoding the RNS-sensing transcription factor and the gene or gene cassette for producing the therapeutic molecule are present on different plasmids. In some embodiments, the gene encoding the RNS-sensing transcription factor and the gene or gene cassette for producing the therapeutic molecule are present on the same plasmid. In some embodiments, the gene encoding the RNS-sensing transcription factor is present on a chromosome. In some embodiments, the gene encoding the RNS-sensing transcription factor and the gene or gene cassette for producing the therapeutic molecule are present on different chromosomes. In some embodiments, the gene encoding the RNS-sensing transcription factor and the gene or gene cassette for producing the therapeutic molecule are present on the same chromosome.

[0302] In some embodiments, the recombinant bacteria comprise a wild-type gene encoding a RNS-sensing transcription factor, e.g., the NsrR gene, and a corresponding regulatory region, e.g., a norB regulatory region, that is mutated relative to the wild-type regulatory region from bacteria of the same subtype. The mutated regulatory region increases the expression of the payload in the presence of RNS, as compared to the wild-type regulatory region under the same conditions. In some embodiments, the recombinant bacteria comprise a wild-type RNS-responsive regulatory region, e.g., the norB regulatory region, and a corresponding transcription factor, e.g., NsrR, that is mutated relative to the wild-type transcription factor from bacteria of the same subtype. The mutant transcription factor increases the expression of the payload in the presence of RNS, as compared to the wild-type transcription factor under the same conditions. In some embodiments, both the RNS-sensing transcription factor and corresponding regulatory region are mutated relative to the wild-type sequences from bacteria of the same subtype in order to increase expression of the payload in the presence of RNS.

[0303] In some embodiments, the gene or gene cassette for producing the e molecule(s) is present on a plasmid and operably linked to a promoter that is induced by RNS. In some embodiments, expression is further optimized by methods known in the art, e.g., by optimizing ribosomal binding sites, manipulating transcriptional regulators, and/or increasing mRNA stability.

[0304] In some embodiments, any of the gene(s) of the present disclosure may be integrated into the bacterial chromosome at one or more integration sites. For example, one or more copies of one or more encoding a payload gene(s) may be integrated into the bacterial chromosome. Having multiple copies of the gene or gen(s) integrated into the chromosome allows for greater production of the payload(s) and also permits fine-tuning of the level of expression. Alternatively, different circuits described herein, such as any of the secretion or exporter circuits, in addition to the therapeutic gene(s) or gene cassette(s) could be integrated into the bacterial chromosome at one or more different integration sites to perform multiple different functions.

[0305] In some embodiments, the recombinant bacteria produce at least one payload in the presence of RNS to reduce local gut inflammation by at least about 1.5-fold, at least about 2-fold, at least about 10-fold, at least about 15-fold, at least about 20-fold, at least about 30-fold, at least about 50-fold, at least about 100-fold, at least about 200-fold, at least about 300-fold, at least about 400-fold, at least about 500-fold, at least about 600-fold, at least about 700-fold, at least about 800-fold, at least about 900-fold, at least about 1,000-fold, or at least about 1,500-fold as compared to unmodified bacteria of the same subtype under the same conditions. Inflammation may be measured by methods known in the art, e.g., counting disease lesions using endoscopy; detecting T regulatory cell differentiation in peripheral blood, e.g., by fluorescence activated sorting; measuring T regulatory cell levels; measuring cytokine levels; measuring areas of mucosal damage; assaying inflammatory biomarkers, e.g., by qPCR; PCR arrays; transcription factor phosphorylation assays; immunoassays; and/or cytokine assay kits (Mesoscale, Cayman Chemical, Qiagen).

[0306] In some embodiments, the recombinant bacteria produce at least about 1.5-fold, at least about 2-fold, at least about 10-fold, at least about 15-fold, at least about 20-fold, at least about 30-fold, at least about 50-fold, at least about 100-fold, at least about 200-fold, at least about 300-fold, at least about 400-fold, at least about 500-fold, at least about 600-fold, at least about 700-fold, at least about 800-fold, at least about 900-fold, at least about 1,000-fold, or at least about 1,500-fold more of payload in the presence of RNS than unmodified bacteria of the same subtype under the same conditions. Certain unmodified bacteria will not have detectable levels of the payload. In embodiments using genetically modified forms of these bacteria, payload will be detectable in the presence of RNS.

[0307] ROS-Dependent Regulation

[0308] In some embodiments, the recombinant bacteria comprise a gene for producing a payload that is expressed under the control of an inducible promoter. In some embodiments, the recombinant bacterium that expresses a payload under the control of a promoter that is activated by conditions of cellular damage. In one embodiment, the gene for producing the payload is expressed under the control of an cellular damaged-dependent promoter that is activated in environments in which there is cellular or tissue damage, e.g., a reactive oxygen species or ROS promoter.

[0309] As used herein, “reactive oxygen species” and “ROS” are used interchangeably to refer to highly active molecules, ions, and/or radicals derived from molecular oxygen. ROS can be produced as byproducts of aerobic respiration or metal-catalyzed oxidation and may cause deleterious cellular effects such as oxidative damage. ROS includes, but is not limited to, hydrogen peroxide (H₂O₂), organic peroxide (ROOH), hydroxyl ion (OH—), hydroxyl radical (·OH), superoxide or superoxide anion (·O2-), singlet oxygen (1O2), ozone (O3), carbonate radical, peroxide or peroxyl radical (·O2-2), hypochlorous acid (HOCl), hypochlorite ion (OCl—), sodium hypochlorite (NaOCl), nitric oxide (NO·), and peroxynitrite or peroxynitrite anion (ONOO—) (unpaired electrons denoted by ·). Bacteria have evolved transcription factors that are capable of sensing ROS levels. Different ROS signaling pathways are triggered by different ROS levels and occur with different kinetics (Marinho et al., 2014).

[0310] As used herein, “ROS-inducible regulatory region” refers to a nucleic acid sequence to which one or more ROS-sensing transcription factors is capable of binding, wherein the binding and/or activation of the corresponding transcription factor activates downstream gene expression; in the presence of ROS, the transcription factor binds to and/or activates the regulatory region. In some embodiments, the ROS-inducible regulatory region comprises a promoter sequence. In some embodiments, the transcription factor senses ROS and subsequently binds to the ROS-inducible regulatory region, thereby activating downstream gene expression. In alternate embodiments, the transcription factor is bound to the ROS-inducible regulatory region in the absence of ROS; in the presence of ROS, the transcription factor undergoes a conformational change, thereby activating downstream gene expression. The ROS-inducible regulatory region may be operatively linked to a gene sequence or gene sequence, e.g., a sequence or sequences encoding one or more payload(s). For example, in the presence of ROS, a transcription factor, e.g., OxyR, senses ROS and activates a corresponding ROS-inducible regulatory region, thereby driving expression of an operatively linked gene sequence or gene sequences. Thus, ROS induces expression of the gene or genes. Alternatively, in the presence of ROS, a transcription factor, e.g., PerR, senses ROS and binds to a corresponding ROS-repressible regulatory region, thereby blocking expression of an operatively linked gene sequence or gene sequences. Thus, ROS represses expression of the gene or genes.

[0311] Each regulatory region is capable of binding at least one corresponding ROS-sensing transcription factor. Examples of transcription factors that sense ROS and their corresponding ROS-responsive genes, promoters, and/or regulatory regions include, but are not limited to, those shown in Table 7.

TABLE 7
Examples of ROS-sensing transcription
factors and ROS-responsive genes

| ROS-sensing | Primarily | |
|---|---|---|
| transcription | capable of | Examples of responsive genes, |
| factor: | sensing: | promoters, and/or regulatory regions: |
| OxyR | H₂O₂ | ahpC; ahpF; dps; dsbG; fhuF; flu; fur; |
| | | gor; grxA; hemH; katG; oxyS; sufA; sufB; |
| | | sufC; sufD; sufE; sufS; trxC; uxuA; yaaA; |
| | | yaeH; yaiA; ybjM; ydcH; ydeN; ygaQ; |
| | | yljA; ytfK |
| PerR | H₂O₂ | katA; ahpCF; mrgA; zoaA; fur; |
| | | hemAXCDBL; srfA |
| OhrR | Organic | ohrA |
| | peroxides | |
| | NaOCl | |
| SoxR | •O₂⁻ | soxS |
| | NO• | |
| | (also capable | |
| | of sensing | |
| | H₂O₂) | |
| RosR | H₂O₂ | rbtT; tnp16a; rluC1; tnp5a; mscL; tnp2d; |
| | | phoD; tnp15b; pstA; tnp5b; xylC; gabD1; |
| | | rluC2; cgtS9; azlC; narKGHJI; rosR |

[0312] In some embodiments, the recombinant bacteria comprise a tunable regulatory region that is directly or indirectly controlled by a transcription factor that is capable of sensing at least one reactive oxygen species. The tunable regulatory region is operatively linked to a gene or gene cassette capable of directly or indirectly driving the expression of a payload, thus controlling expression of the payload relative to ROS levels. For example, the tunable regulatory region is a ROS-inducible regulatory region, and the molecule is a payload; when ROS is present, e.g., in an inflamed tissue, a ROS-sensing transcription factor binds to and/or activates the regulatory region and drives expression of the gene sequence for the payload, thereby producing the payload. Subsequently, when inflammation is ameliorated, ROS levels are reduced, and production of the payload is decreased or eliminated.

[0313] In some embodiments, the tunable regulatory region is a ROS-inducible regulatory region; in the presence of ROS, a transcription factor senses ROS and activates the ROS-inducible regulatory region, thereby driving expression of an operatively linked gene or gene cassette. In some embodiments, the transcription factor senses ROS and subsequently binds to the ROS-inducible regulatory region, thereby activating downstream gene expression. In alternate embodiments, the transcription factor is bound to the ROS-inducible regulatory region in the absence of ROS; when the transcription factor senses ROS, it undergoes a conformational change, thereby inducing downstream gene expression.

[0314] In some embodiments, the tunable regulatory region is a ROS-inducible regulatory region, and the transcription factor that senses ROS is OxyR. OxyR “functions primarily as a global regulator of the peroxide stress response” and is capable of regulating dozens of genes, e.g., “genes involved in H₂O₂ detoxification (katE, ahpCF), heme biosynthesis (hemH), reductant supply (grxA, gor, trxC), thiol-disulfide isomerization (dsbG), Fe—S center repair (sufA-E, sufS), iron binding (yaaA), repression of iron import systems (fur)” and “OxyS, a small regulatory RNA” (Dubbs et al., 2012). The recombinant bacteria may comprise any suitable ROS-responsive regulatory region from a gene that is activated by OxyR. Genes that are capable of being activated by OxyR are known in the art (see, e.g., Zheng et al., 2001; Dubbs et al., 2012). In certain embodiments, the recombinant bacteria comprise a ROS-inducible regulatory region from oxyS that is operatively linked to a gene, e.g., a payload gene. In the presence of ROS, e.g., H2O2, an OxyR transcription factor senses ROS and activates to the oxyS regulatory region, thereby driving expression of the operatively linked payload gene and producing the payload. In some embodiments, OxyR is encoded by an E. coli oxyR gene. In some embodiments, the oxyS regulatory region is an E. coli oxyS regulatory region. In some embodiments, the ROS-inducible regulatory region is selected from the regulatory region of katG, dps, and ahpC.

[0315] In alternate embodiments, the tunable regulatory region is a ROS-inducible regulatory region, and the corresponding transcription factor that senses ROS is SoxR. When SoxR is “activated by oxidation of its [2Fe-2S] cluster, it increases the synthesis of SoxS, which then activates its target gene expression” (Koo et al., 2003). “SoxR is known to respond primarily to superoxide and nitric oxide” (Koo et al., 2003), and is also capable of responding to H2O2. The recombinant bacteria may comprise any suitable ROS-responsive regulatory region from a gene that is activated by SoxR. Genes that are capable of being activated by SoxR are known in the art (see, e.g., Koo et al., 2003). In certain embodiments, the recombinant bacteria comprise a ROS-inducible regulatory region from soxS that is operatively linked to a gene, e.g., a payload. In the presence of ROS, the SoxR transcription factor senses ROS and activates the soxS regulatory region, thereby driving expression of the operatively linked a payload gene and producing the a payload.

[0316] In some embodiments, the tunable regulatory region is a ROS-derepressible regulatory region, and binding of a corresponding transcription factor represses downstream gene expression; in the presence of ROS, the transcription factor no longer binds to the regulatory region, thereby derepressing the operatively linked gene or gene cassette.

[0317] In some embodiments, the tunable regulatory region is a ROS-derepressible regulatory region, and the transcription factor that senses ROS is OhrR. OhrR “binds to a pair of inverted repeat DNA sequences overlapping the ohrA promoter site and thereby represses the transcription event,” but oxidized OhrR is “unable to bind its DNA target” (Duarte et al., 2010). OhrR is a “transcriptional repressor [that] . . . senses both organic peroxides and NaOCl” (Dubbs et al., 2012) and is “weakly activated by H₂O₂ but it shows much higher reactivity for organic hydroperoxides” (Duarte et al., 2010). The recombinant bacteria may comprise any suitable ROS-responsive regulatory region from a gene that is repressed by OhrR. Genes that are capable of being repressed by OhrR are known in the art (see, e.g., Dubbs et al., 2012). In certain embodiments, the recombinant bacteria comprise a ROS-derepressible regulatory region from ohrA that is operatively linked to a gene or gene cassette, e.g., a payload gene. In the presence of ROS, e.g., NaOCl, an OhrR transcription factor senses ROS and no longer binds to the ohrA regulatory region, thereby derepressing the operatively linked payload gene and producing the a payload.

[0318] OhrR is a member of the MarR family of ROS-responsive regulators. “Most members of the MarR family are transcriptional repressors and often bind to the -10 or -35 region in the promoter causing a steric inhibition of RNA polymerase binding” (Bussmann et al., 2010). Other members of this family are known in the art and include, but are not limited to, OspR, MgrA, RosR, and SarZ. In some embodiments, the transcription factor that senses ROS is OspR, MgRA, RosR, and/or SarZ, and the recombinant bacteria comprises one or more corresponding regulatory region sequences from a gene that is repressed by OspR, MgRA, RosR, and/or SarZ. Genes that are capable of being repressed by OspR, MgRA, RosR, and/or SarZ are known in the art (see, e.g., Dubbs et al., 2012).

[0319] In some embodiments, the tunable regulatory region is a ROS-derepressible regulatory region, and the corresponding transcription factor that senses ROS is RosR. RosR is “a MarR-type transcriptional regulator” that binds to an “18-bp inverted repeat with the consensus sequence TTGTTGAYRYRTCAACWA (SEQ ID NO: 1085)” and is “reversibly inhibited by the oxidant H2O2” (Bussmann et al., 2010). RosR is capable of repressing numerous genes and putative genes, including but not limited to “a putative polyisoprenoid-binding protein (cg1322, gene upstream of and divergent from rosR), a sensory histidine kinase (cgtS9), a putative transcriptional regulator of the Crp/FNR family (cg3291), a protein of the glutathione S-transferase family (cg1426), two putative FMN reductases (cg1150 and cg1850), and four putative monooxygenases (cg0823, cg1848, cg2329, and cg3084)” (Bussmann et al., 2010). The recombinant bacteria may comprise any suitable ROS-responsive regulatory region from a gene that is repressed by RosR. Genes that are capable of being repressed by RosR are known in the art (see, e.g., Bussmann et al., 2010). In certain embodiments, the recombinant bacteria comprise a ROS-derepressible regulatory region from cgtS9 that is operatively linked to a gene or gene cassette, e.g., a payload. In the presence of ROS, e.g., H2O2, a RosR transcription factor senses ROS and no longer binds to the cgtS9 regulatory region, thereby derepressing the operatively linked payload gene and producing the payload.

[0320] In some embodiments, it is advantageous for the recombinant bacteria to express a ROS-sensing transcription factor that does not regulate the expression of a significant number of native genes in the bacteria. In some embodiments, the recombinant bacterium expresses a ROS-sensing transcription factor from a different species, strain, or substrain of bacteria, wherein the transcription factor does not bind to regulatory sequences in the recombinant bacterium. In some embodiments, the recombinant bacterium is Escherichia coli, and the ROS-sensing transcription factor is RosR, e.g., from Corynebacterium glutamicum, wherein the Escherichia coli does not comprise binding sites for said RosR. In some embodiments, the heterologous transcription factor minimizes or eliminates off-target effects on endogenous regulatory regions and genes in the recombinant bacteria.

[0321] In some embodiments, the tunable regulatory region is a ROS-repressible regulatory region, and the transcription factor that senses ROS is PerR. In Bacillus subtilis, PerR “when bound to DNA, represses the genes coding for proteins involved in the oxidative stress response (katA, ahpC, and mrgA), metal homeostasis (hemAXCDBL, fur, and zoaA) and its own synthesis (perR)” (Marinho et al., 2014). PerR is a “global regulator that responds primarily to H2O2” (Dubbs et al., 2012) and “interacts with DNA at the per box, a specific palindromic consensus sequence (TTATAATNATTATAA (SEQ ID NO: 1086)) residing within and near the promoter sequences of PerR-controlled genes” (Marinho et al., 2014). PerR is capable of binding a regulatory region that “overlaps part of the promoter or is immediately downstream from it” (Dubbs et al., 2012). The recombinant bacteria may comprise any suitable ROS-responsive regulatory region from a gene that is repressed by PerR. Genes that are capable of being repressed by PerR are known in the art (see, e.g., Dubbs et al., 2012).

[0322] In these embodiments, the recombinant bacteria may comprise a two repressor activation regulatory circuit, which is used to express a payload. The two repressor activation regulatory circuit comprises a first ROS-sensing repressor, e.g., PerR, and a second repressor, e.g., TetR, which is operatively linked to a gene or gene cassette, e.g., a payload. In one aspect of these embodiments, the ROS-sensing repressor inhibits transcription of the second repressor, which inhibits the transcription of the gene or gene cassette. Examples of second repressors useful in these embodiments include, but are not limited to, TetR, Cl, and LexA. In some embodiments, the ROS-sensing repressor is PerR. In some embodiments, the second repressor is TetR. In this embodiment, a PerR-repressible regulatory region drives expression of TetR, and a TetR-repressible regulatory region drives expression of the gene or gene cassette, e.g., a payload. In the absence of PerR binding (which occurs in the absence of ROS), tetR is transcribed, and TetR represses expression of the gene or gene cassette, e.g., a payload. In the presence of PerR binding (which occurs in the presence of ROS), tetR expression is repressed, and the gene or gene cassette, e.g., a payload, is expressed.

[0323] A ROS-responsive transcription factor may induce, derepress, or repress gene expression depending upon the regulatory region sequence used in the recombinant bacteria. For example, although “OxyR is primarily thought of as a transcriptional activator under oxidizing conditions. OxyR can function as either a repressor or activator under both oxidizing and reducing conditions” (Dubbs et al., 2012), and OxyR “has been shown to be a repressor of its own expression as well as that of fhuF (encoding a ferric ion reductase) and flu (encoding the antigen 43 outer membrane protein)” (Zheng et al., 2001). The recombinant bacteria may comprise any suitable ROS-responsive regulatory region from a gene that is repressed by OxyR. In some embodiments, OxyR is used in a two repressor activation regulatory circuit, as described above. Genes that are capable of being repressed by OxyR are known in the art (see, e.g., Zheng et al., 2001). Or, for example, although RosR is capable of repressing a number of genes, it is also capable of activating certain genes, e.g., the narKGHJI operon. In some embodiments, the recombinant bacteria comprise any suitable ROS-responsive regulatory region from a gene that is activated by RosR. In some embodiments, the recombinant bacteria comprise any suitable ROS-responsive regulatory region from a gene that is activated by PerR.

[0324] One or more types of ROS-sensing transcription factors and corresponding regulatory region sequences may be present in recombinant bacteria. For example, “OhrR is found in both Gram-positive and Gram-negative bacteria and can coreside with either OxyR or PerR or both” (Dubbs et al., 2012). In some embodiments, the recombinant bacteria comprise one type of ROS-sensing transcription factor, e.g., OxyR, and one corresponding regulatory region sequence, e.g., from oxyS. In some embodiments, the recombinant bacteria comprise one type of ROS-sensing transcription factor, e.g., OxyR, and two or more different corresponding regulatory region sequences, e.g., from oxyS and katG. In some embodiments, the recombinant bacteria comprise two or more types of ROS-sensing transcription factors, e.g., OxyR and PerR, and two or more corresponding regulatory region sequences, e.g., from oxyS and katA, respectively. One ROS-responsive regulatory region may be capable of binding more than one transcription factor. In some embodiments, the recombinant bacteria comprise two or more types of ROS-sensing transcription factors and one corresponding regulatory region sequence.

[0325] In some embodiments, recombinant bacteria comprise nucleic acid sequences comprising OxyR binding sites. In some embodiments, recombinant bacteria comprise a nucleic acid sequence that is at least about 80%, 85%, 90%, 95%, or 99% homologous to the DNA sequence of SEQ ID NO: 168, SEQ ID NO: 169, or SEQ ID NO: 170, or SEQ ID NO: 171, or a functional fragment thereof. In some embodiments, the regulatory region sequence is at least about 80%, 85%, 90%, 95%, or 99% homologous to the sequence of SEQ ID NO: 168, SEQ ID NO: 169, SEQ ID NO: 170, and/or SEQ ID NO: 171.

[0326] In some embodiments, the recombinant bacteria comprise a gene encoding a ROS-sensing transcription factor, e.g., the oxyR gene, that is controlled by its native promoter, an inducible promoter, a promoter that is stronger than the native promoter, e.g., the GlnRS promoter or the P(Bla) promoter, or a constitutive promoter. In some instances, it may be advantageous to express the ROS-sensing transcription factor under the control of an inducible promoter in order to enhance expression stability. In some embodiments, expression of the ROS-sensing transcription factor is controlled by a different promoter than the promoter that controls expression of the therapeutic molecule. In some embodiments, expression of the ROS-sensing transcription factor is controlled by the same promoter that controls expression of the therapeutic molecule. In some embodiments, the ROS-sensing transcription factor and therapeutic molecule are divergently transcribed from a promoter region.

[0327] In some embodiments, the recombinant bacteria comprise a gene for a ROS-sensing transcription factor from a different species, strain, or substrain of bacteria. In some embodiments, the recombinant bacteria comprise a ROS-responsive regulatory region from a different species, strain, or substrain of bacteria. In some embodiments, the recombinant bacteria comprise a ROS-sensing transcription factor and corresponding ROS-responsive regulatory region from a different species, strain, or substrain of bacteria. The heterologous ROS-sensing transcription factor and regulatory region may increase the transcription of genes operatively linked to said regulatory region in the presence of ROS, as compared to the native transcription factor and regulatory region from bacteria of the same subtype under the same conditions.

[0328] In some embodiments, the recombinant bacteria comprise a ROS-sensing transcription factor, OxyR, and corresponding regulatory region, oxyS, from Escherichia coli. In some embodiments, the native ROS-sensing transcription factor, e.g., OxyR, is left intact and retains wild-type activity. In alternate embodiments, the native ROS-sensing transcription factor, e.g., OxyR, is deleted or mutated to reduce or eliminate wild-type activity.

[0329] In some embodiments, the recombinant bacteria comprise multiple copies of the endogenous gene encoding the ROS-sensing transcription factor, e.g., the oxyR gene. In some embodiments, the gene encoding the ROS-sensing transcription factor is present on a plasmid. In some embodiments, the gene encoding the ROS-sensing transcription factor and the gene or gene cassette for producing the therapeutic molecule are present on different plasmids. In some embodiments, the gene encoding the ROS-sensing transcription factor and the gene or gene cassette for producing the therapeutic molecule are present on the same. In some embodiments, the gene encoding the ROS-sensing transcription factor is present on a chromosome. In some embodiments, the gene encoding the ROS-sensing transcription factor and the gene or gene cassette for producing the therapeutic molecule are present on different chromosomes. In some embodiments, the gene encoding the ROS-sensing transcription factor and the gene or gene cassette for producing the therapeutic molecule are present on the same chromosome.

[0330] In some embodiments, the recombinant bacteria comprise a wild-type gene encoding a ROS-sensing transcription factor, e.g., the soxR gene, and a corresponding regulatory region, e.g., a soxS regulatory region, that is mutated relative to the wild-type regulatory region from bacteria of the same subtype. The mutated regulatory region increases the expression of the payload in the presence of ROS, as compared to the wild-type regulatory region under the same conditions. In some embodiments, the recombinant bacteria comprise a wild-type ROS-responsive regulatory region, e.g., the oxyS regulatory region, and a corresponding transcription factor, e.g., OxyR, that is mutated relative to the wild-type transcription factor from bacteria of the same subtype. The mutant transcription factor increases the expression of the payload in the presence of ROS, as compared to the wild-type transcription factor under the same conditions. In some embodiments, both the ROS-sensing transcription factor and corresponding regulatory region are mutated relative to the wild-type sequences from bacteria of the same subtype in order to increase expression of the payload in the presence of ROS.

[0331] In some embodiments, the gene or gene cassette for producing the payload is present on a plasmid and operably linked to a promoter that is induced by ROS. In some embodiments, the gene or gene cassette for producing the payload is present in the chromosome and operably linked to a promoter that is induced by ROS. In some embodiments, the gene or gene cassette for producing the payload is present on a chromosome and operably linked to a promoter that is induced by exposure to tetracycline. In some embodiments, the gene or gene cassette for producing the payload is present on a plasmid and operably linked to a promoter that is induced by exposure to tetracycline. In some embodiments, expression is further optimized by methods known in the art, e.g., by optimizing ribosomal binding sites, manipulating transcriptional regulators, and/or increasing mRNA stability.

[0332] In some embodiments, the recombinant bacteria may comprise multiple copies of the gene(s) capable of producing a payload(s). In some embodiments, the gene(s) capable of producing a payload(s) is present on a plasmid and operatively linked to a ROS-responsive regulatory region. In some embodiments, the gene(s) capable of producing a payload is present in a chromosome and operatively linked to a ROS-responsive regulatory region.

[0333] Thus, in some embodiments, the recombinant bacteria produce one or more payloads under the control of an oxygen level-dependent promoter, a reactive oxygen species (ROS)-dependent promoter, or a reactive nitrogen species (RNS)-dependent promoter, and a corresponding transcription factor.

[0334] In some embodiments, the recombinant bacteria comprise a stably maintained plasmid or chromosome carrying a gene for producing a payload, such that the payload can be expressed in the host cell, and the host cell is capable of survival and/or growth in vitro, e.g., in medium, and/or in vivo. In some embodiments, a bacterium may comprise multiple copies of the gene encoding the payload. In some embodiments, the gene encoding the payload is expressed on a low-copy plasmid. In some embodiments, the low-copy plasmid may be useful for increasing stability of expression. In some embodiments, the low-copy plasmid may be useful for decreasing leaky expression under non-inducing conditions. In some embodiments, the gene encoding the payload is expressed on a high-copy plasmid. In some embodiments, the high-copy plasmid may be useful for increasing expression of the payload. In some embodiments, the gene encoding the payload is expressed on a chromosome.

[0335] Propionate and Other Promoters

[0336] In some embodiments, the recombinant bacteria comprise the gene or gene cassette for producing an effector molecule, or a therapeutic polypeptides, expressed under the control of an inducible promoter that is responsive to specific molecules or metabolites in the environment, e.g., the tumor microenvironment, a specific tissue, or the mammalian gut. For example, the short-chain fatty acid propionate is a major microbial fermentation metabolite localized to the gut (Hosseini et al., 2011). In one embodiment, the gene or gene cassette for producing an effector molecule(s) is under the control of a propionate-inducible promoter. In a more specific embodiment, the gene or gene cassette for producing the effector molecule(s) is under the control of a propionate-inducible promoter that is activated by the presence of propionate in the mammalian gut. Any molecule or metabolite found in the mammalian gut, in a healthy and/or disease state, may be used to induce payload expression. Non-limiting examples of inducers include propionate, bilirubin, aspartate aminotransferase, alanine aminotransferase, blood coagulation factors II, VII, IX, and X, alkaline phosphatase, gamma glutamyl transferase, hepatitis antigens and antibodies, alpha fetoprotein, anti-mitochondrial, smooth muscle, and anti-nuclear antibodies, iron, transferrin, ferritin, copper, ceruloplasmin, ammonia, and manganese. In alternate embodiments, the gene or gene cassette for producing an effector molecule(s) is under the control of a pBAD promoter, which is activated in the presence of the sugar arabinose.

[0337] In some embodiments, the gene or gene cassette for producing the effector molecule(s) is present on a plasmid and operably linked to a promoter that is induced under low-oxygen or anaerobic conditions. In some embodiments, the gene or gene cassette for producing the effector molecule(s) is present in the chromosome and operably linked to a promoter that is induced under low-oxygen or anaerobic conditions. In some embodiments, the gene or gene cassette for producing the effector molecule(s) is present on a plasmid and operably linked to a promoter that is induced by molecules or metabolites that are specific to the mammalian gut. In some embodiments, the gene or gene cassette for producing the effector molecule(s) is present on a chromosome and operably linked to a promoter that is induced by molecules or metabolites that are specific to the tumor and/or the mammalian gut. In some embodiments, the gene or gene cassette for producing the effector molecule(s) is present on a chromosome and operably linked to a promoter that is induced by exposure to tetracycline. In some embodiments, the gene or gene cassette for producing the effector molecule(s) is present on a plasmid and operably linked to a promoter that is induced by exposure to tetracycline. In some embodiments, expression is further optimized by methods known in the art, e.g., by optimizing ribosomal binding sites, manipulating transcriptional regulators, and/or increasing mRNA stability.

[0338] In some embodiments, the recombinant bacteria comprise a stably maintained plasmid or chromosome carrying the gene or gene cassette for producing the effector molecule(s), such that the gene or gene cassette can be expressed in the host cell, and the host cell is capable of survival and/or growth in vitro, e.g., in medium, and/or in vivo, e.g., in the gut. In some embodiments, a bacterium may comprise multiple copies of the gene or gene cassette for producing the effector molecule(s). In some embodiments, gene or gene cassette for producing the payload is expressed on a low-copy plasmid. In some embodiments, the low-copy plasmid may be useful for increasing stability of expression. In some embodiments, the low-copy plasmid may be useful for decreasing leaky expression under non-inducing conditions. In some embodiments, gene or gene cassette for producing the effector molecule(s) is expressed on a high-copy plasmid. In some embodiments, the high-copy plasmid may be useful for increasing gene or gene cassette expression. In some embodiments, gene or gene cassette for producing the effector molecule(s) is expressed on a chromosome.

[0339] In some embodiments, the recombinant bacteria comprise a regulatory region comprising a propionate promoter, which is induced in the mammalian gut. In some embodiments, the propionate promoter sequence is at least about 80%, 85%, 90%, 95%, or 99% homologous to the sequence of SEQ ID NO: 172.

[0340] Other Inducible Promoters

[0341] In some embodiments, the gene encoding the effector molecule(s) is present on a plasmid and operably linked to a promoter that is induced by one or more nutritional and/or chemical inducer(s) and/or metabolite(s). In some embodiments, the gene encoding the effector molecule(s) is present in the chromosome and operably linked to a promoter that is induced by one or more nutritional and/or chemical inducer(s) and/or metabolite(s).

[0342] In some embodiments, the bacterial cell comprises a stably maintained plasmid or chromosome carrying the one or more gene sequences(s), inducible by one or more nutritional and/or chemical inducer(s) and/or metabolite(s), encoding the effector molecule(s), such that the effector molecule(s) can be expressed in the host cell, and the host cell is capable of survival and/or growth in vitro, e.g., in medium, and/or in vivo, e.g., in the gut. In some embodiments, bacterial cell comprises two or more distinct copies of the one or more gene sequences(s) encoding the effector molecule(s), which is controlled by a promoter inducible one or more nutritional and/or chemical inducer(s) and/or metabolite(s). In some embodiments, the recombinant bacteria comprise multiple copies of the same one or more gene sequences(s) encoding the effector molecule(s), which is controlled by a promoter inducible one or more nutritional and/or chemical inducer(s) and/or metabolite(s). In some embodiments, the one or more gene sequences(s) encoding the effector molecule(s), is present on a plasmid and operably linked to a directly or indirectly inducible promoter inducible by one or more nutritional and/or chemical inducer(s) and/or metabolite(s). In some embodiments, the one or more gene sequences(s) encoding the effector molecule(s), is present on a chromosome and operably linked to a directly or indirectly inducible by one or more nutritional and/or chemical inducer(s) and/or metabolite(s).

[0343] In some embodiments, expression of one or more effector molecule(s) and/or other polypeptide(s) of interest, is driven directly or indirectly by one or more promoter(s) induced by a chemical and/or nutritional inducer and/or metabolite during in vitro growth, preparation, or manufacturing of the strain prior to in vivo administration. In some embodiments, the promoter(s) induced by a chemical and/or nutritional inducer and/or metabolite are induced in culture, e.g., grown in a flask, fermenter or other appropriate culture vessel, e.g., used during cell growth, cell expansion, fermentation, recovery, purification, formulation, and/or manufacture. In some embodiments, the promoter is directly or indirectly induced by a molecule that is added to in the bacterial culture to induce expression and pre-load the bacterium with the effector molecule(s) and/or other polypeptide(s) of interest prior to administration. In some embodiments, the cultures, which are induced by a chemical and/or nutritional inducer and/or metabolite, are grown aerobically. In some embodiments, the cultures, which are induced by a chemical and/or nutritional inducer and/or metabolite, are grown anaerobically.

[0344] In some embodiments, expression of one or more effector molecule(s) and/or other polypeptide(s) of interest is driven directly or indirectly by one or more arabinose inducible promoter(s) in vivo. In some embodiments, the promoter is directly or indirectly induced by a chemical and/or nutritional inducer and/or metabolite which is co-administered with the recombinant bacteria, e.g., arabinose.

[0345] The genes of arabinose metabolism are organized in one operon, AraBAD, which is controlled by the PAraBAD promoter. The PAraBAD (or Para) promoter suitably fulfills the criteria of inducible expression systems. PAraBAD displays tighter control of payload gene expression than many other systems, likely due to the dual regulatory role of AraC, which functions both as an inducer and as a repressor. Additionally, the level of ParaBAD-based expression can be modulated over a wide range of L-arabinose concentrations to fine-tune levels of expression of the payload. However, the cell population exposed to sub-saturating L-arabinose concentrations is divided into two subpopulations of induced and uninduced cells, which is determined by the differences between individual cells in the availability of L-arabinose transporter (Zhang et al., Development and Application of an Arabinose-Inducible Expression System by Facilitating Inducer Uptake in Corynebacterium glutamicum; Appl. Environ. Microbiol. August 2012 vol. 78 no. 16 5831-5838). Alternatively, inducible expression from the ParaBad can be controlled or fine-tuned through the optimization of the ribosome binding site (RBS), as described herein.

[0346] In one embodiment, the arabinose inducible promoter drives the expression of a construct comprising one or more protein(s) of interest, jointly with a second promoter, e.g., a second constitutive or inducible promoter. In some embodiments, two promoters are positioned proximally to the construct and drive its expression, wherein the arabinose inducible promoter drives expression under a first set of exogenous conditions, and the second promoter drives the expression under a second set of exogenous conditions. In a non-limiting example, the first and second conditions may be two sequential culture conditions (i.e., during preparation of the culture in a flask, fermenter or other appropriate culture vessel, e.g., arabinose and IPTG). In another non-limiting example, the first inducing conditions may be culture conditions, e.g., including arabinose presence, and the second inducing conditions may be in vivo conditions. Such in vivo conditions include low-oxygen, microaerobic, or anaerobic conditions, presence of gut metabolites, and/or metabolites administered in combination with the bacterial strain. In some embodiments, the one or more arabinose promoters drive expression of one or more protein(s) of interest, in combination with the FNR promoter driving the expression of the same gene sequence(s).

[0347] In some embodiments, one or more protein(s) of interest are knocked into the arabinose operon and are driven by the native arabinose inducible promoter

[0348] In some embodiments, the recombinant bacteria comprise one or more gene sequence(s) having at least 80%, 81%, 82%, 83%, 84%, 85%, 86%, 87%, 88%, 89%, 90%, 91%, 92%, 93%, 94%, 95%, 96%, 97%, 98%, or 99% identity with any of the sequences of SEQ ID NO: 174. In some embodiments, the arabinose inducible construct further comprises a gene encoding AraC, which is divergently transcribed from the same promoter as the one or more one or more protein(s) of interest. In some embodiments, the recombinant bacteria comprise one or more gene sequence(s) having at least 80%, 81%, 82%, 83%, 84%, 85%, 86%, 87%, 88%, 89%, 90%, 91%, 92%, 93%, 94%, 95%, 96%, 97%, 98%, or 99% identity with any of the sequences of SEQ ID NO: 174. In some embodiments, the recombinant bacteria comprise one or more gene sequence(s) encoding a polypeptide having at least 80%, 81%, 82%, 83%, 84%, 85%, 86%, 87%, 88%, 89%, 90%, 91%, 92%, 93%, 94%, 95%, 96%, 97%, 98%, or 99% identity with the polypeptide encoded by any of the sequences of SEQ ID NO: 175.

[0349] In some embodiments, the recombinant bacteria comprise one or more gene sequence(s) which are inducible through a rhamnose inducible system. The genes rhaBAD are organized in one operon which is controlled by the rhaP BAD promoter. The rhaP BAD promoter is regulated by two activators, RhaS and RhaR, and the corresponding genes belong to one transcription unit which divergently transcribed in the opposite direction of rhaBAD. In the presence of L-rhamnose, RhaR binds to the rhaP RS promoter and activates the production of RhaR and RhaS. RhaS together with L-rhamnose then bind to the rhaP BAD and the rhaP T promoter and activate the transcription of the structural genes. In contrast to the arabinose system, in which AraC is provided and divergently transcribed in the gene sequence(s), it is not necessary to express the regulatory proteins in larger quantities in the rhamnose expression system because the amounts expressed from the chromosome are sufficient to activate transcription even on multi-copy plasmids. Therefore, only the rhaP BAD promoter is cloned upstream of the gene that is to be expressed. Full induction of rhaBAD transcription also requires binding of the CRP-cAMP complex, which is a key regulator of catabolite repression. Alternatively, inducible expression from the rhaBAD can be controlled or fine-tuned through the optimization of the ribosome binding site (RBS), as described herein.

[0350] In one embodiment, expression of one or more protein(s) of interest is driven directly or indirectly by one or more rhamnose inducible promoter(s). In one embodiment, expression of the payload is driven directly or indirectly by a rhamnose inducible promoter.

[0351] In some embodiments, the rhamnose inducible promoter is useful for or induced during in vivo expression of the one or more protein(s) of interest. In some embodiments, expression of one or more protein(s) of interest is driven directly or indirectly by one or more rhamnose inducible promoter(s) in vivo. In some embodiments, the promoter is directly or indirectly induced by a molecule that is co-administered with the recombinant bacteria, e.g., rhamnose

[0352] In one embodiment, the rhamnose inducible promoter drives the expression of a construct comprising one or more protein(s) of interest jointly with a second promoter, e.g., a second constitutive or inducible promoter. In some embodiments, two promoters are positioned proximally to the construct and drive its expression, wherein the rhamnose inducible promoter drives expression under a first set of exogenous conditions, and the second promoter drives the expression under a second set of exogenous conditions.

[0353] In some embodiments, the recombinant bacteria comprise one or more gene sequence(s) having at least 80%, 81%, 82%, 83%, 84%, 85%, 86%, 87%, 88%, 89%, 90%, 91%, 92%, 93%, 94%, 95%, 96%, 97%, 98%, or 99% identity with any of the sequences of SEQ ID NO: 176.

[0354] In some embodiments, the recombinant bacteria comprise one or more gene sequence(s) which are inducible through an Isopropyl β-D-1-thiogalactopyranoside (IPTG) inducible system or other compound which induced transcription from the Lac Promoter. IPTG is a molecular mimic of allolactose, a lactose metabolite that activates transcription of the lac operon. In contrast to allolactose, the sulfur atom in IPTG creates a non-hydrolyzable chemical blond, which prevents the degradation of IPTG, allowing the concentration to remain constant. IPTG binds to the lac repressor and releases the tetrameric repressor (lad) from the lac operator in an allosteric manner, thereby allowing the transcription of genes in the lac operon. Since IPTG is not metabolized by E. coli, its concentration stays constant and the rate of expression of Lac promoter-controlled is tightly controlled, both in vivo and in vitro. IPTG intake is independent on the action of lactose permease, since other transport pathways are also involved. Inducible expression from the PLac can be controlled or fine-tuned through the optimization of the ribosome binding site (RBS), as described herein. Other compounds which inactivate LacI, can be used instead of IPTG in a similar manner.

[0355] In one embodiment, expression of one or more protein(s) of interest is driven directly or indirectly by one or more IPTG inducible promoter(s). In some embodiments, the IPTG inducible promoter is useful for or induced during in vivo expression of the one or more protein(s) of interest. In some embodiments, expression of one or more protein(s) of interest is driven directly or indirectly by one or more IPTG inducible promoter(s) in vivo. In some embodiments, the promoter is directly or indirectly induced by a molecule that is co-administered with the recombinant bacteria, e.g., IPTG.

[0356] In one embodiment, the IPTG inducible promoter drives the expression of a construct comprising one or more protein(s) of interest jointly with a second promoter, e.g., a second constitutive or inducible promoter. In some embodiments, two promoters are positioned proximally to the construct and drive its expression, wherein the IPTG inducible promoter drives expression under a first set of exogenous conditions, and the second promoter drives the expression under a second set of exogenous conditions.

[0357] In some embodiments, the recombinant bacteria comprise one or more gene sequence(s) having at least 80%, 81%, 82%, 83%, 84%, 85%, 86%, 87%, 88%, 89%, 90%, 91%, 92%, 93%, 94%, 95%, 96%, 97%, 98%, or 99% identity with any of the sequences of SEQ ID NO: 177. In some embodiments, the IPTG inducible construct further comprises a gene encoding lad, which is divergently transcribed from the same promoter as the one or more one or more protein(s) of interest. In some embodiments, the recombinant bacteria comprise one or more gene sequence(s) having at least 80%, 81%, 82%, 83%, 84%, 85%, 86%, 87%, 88%, 89%, 90%, 91%, 92%, 93%, 94%, 95%, 96%, 97%, 98%, or 99% identity with any of the sequences of SEQ ID NO: 177. In some embodiments, the recombinant bacteria comprise one or more gene sequence(s) encoding a polypeptide having at least 80%, 81%, 82%, 83%, 84%, 85%, 86%, 87%, 88%, 89%, 90%, 91%, 92%, 93%, 94%, 95%, 96%, 97%, 98%, or 99% identity with the polypeptide encoded by any of the sequences of SEQ ID NO: 180.

[0358] In some embodiments, the recombinant bacteria comprise one or more gene sequence(s) which are inducible through a tetracycline inducible system. The initial system Gossen and Bujard (Tight control of gene expression in mammalian cells by tetracycline-responsive promoters. Gossen M & Bujard H. PNAS, 1992 Jun. 15; 89(12):5547-51) developed is known as tetracycline off: in the presence of tetracycline, expression from a tet-inducible promoter is reduced. Tetracycline-controlled transactivator (tTA) was created by fusing tetR with the C-terminal domain of VP16 (virion protein 16) from herpes simplex virus. In the absence of tetracycline, the tetR portion of tTA will bind tetO sequences in the tet promoter, and the activation domain promotes expression. In the presence of tetracycline, tetracycline binds to tetR, precluding tTA from binding to the tetO sequences. Next, a reverse Tet repressor (rTetR), was developed which created a reliance on the presence of tetracycline for induction, rather than repression. The new transactivator rtTA (reverse tetracycline-controlled trans activator) was created by fusing rTetR with VP16. The tetracycline on system is also known as the rtTA-dependent system.

[0359] In one embodiment, expression of one or more protein(s) of interest is driven directly or indirectly by one or more tetracycline inducible promoter(s). In some embodiments, the tetracycline inducible promoter is useful for or induced during in vivo expression of the one or more protein(s) of interest. In some embodiments, expression of one or more protein(s) of interest and/or transcriptional regulator(s), e.g., FNRS24Y, is driven directly or indirectly by one or more tetracycline inducible promoter(s) in vivo. In some embodiments, the promoter is directly or indirectly induced by a molecule that is co-administered with the recombinant bacteria, e.g., tetracycline

[0360] In one embodiment, the tetracycline inducible promoter drives the expression of a construct comprising one or more protein(s) of interest jointly with a second promoter, e.g., a second constitutive or inducible promoter. In some embodiments, two promoters are positioned proximally to the construct and drive its expression, wherein the tetracycline inducible promoter drives expression under a first set of exogenous conditions, and the second promoter drives the expression under a second set of exogenous conditions.

[0361] In some embodiments, the recombinant bacteria comprise one or more gene sequence(s) having at least 80%, 81%, 82%, 83%, 84%, 85%, 86%, 87%, 88%, 89%, 90%, 91%, 92%, 93%, 94%, 95%, 96%, 97%, 98%, or 99% identity with any of the bolded sequences of SEQ ID NO: 181 (tet promoter is in bold). In some embodiments, the tetracycline inducible construct further comprises a gene encoding AraC, which is divergently transcribed from the same promoter as the one or more one or more protein(s) of interest. In some embodiments, the recombinant bacteria comprise one or more gene sequence(s) having at least 80%, 81%, 82%, 83%, 84%, 85%, 86%, 87%, 88%, 89%, 90%, 91%, 92%, 93%, 94%, 95%, 96%, 97%, 98%, or 99% identity with any of the sequences of SEQ ID NO: 182 in italics (Tet repressor is in italics). In some embodiments, the recombinant bacteria comprise one or more gene sequence(s) encoding a polypeptide having at least 80%, 81%, 82%, 83%, 84%, 85%, 86%, 87%, 88%, 89%, 90%, 91%, 92%, 93%, 94%, 95%, 96%, 97%, 98%, or 99% identity with the polypeptide encoded by any of the sequences of SEQ ID NO: 182 in italics (Tet repressor is in italics).

[0362] In some embodiments, the recombinant bacteria comprise one or more gene sequence(s) whose expression is controlled by a temperature sensitive mechanism. Thermoregulators are advantageous because of strong transcriptional control without the use of external chemicals or specialized media (see, e.g., Nemani et al., Magnetic nanoparticle hyperthermia induced cytosine deaminase expression in microencapsulated E. coli for enzyme-prodrug therapy; J Biotechnol. 2015 Jun. 10; 203: 32-40, and references therein). Thermoregulated protein expression using the mutant cI857 repressor and the pL and/or pR phage λ promoters have been used to engineer recombinant bacterial strains. The gene of interest cloned downstream of the λ promoters can then be efficiently regulated by the mutant thermolabile cI857 repressor of bacteriophage λ. At temperatures below 37° C., cI857 binds to the oL or oR regions of the pR promoter and blocks transcription by RNA polymerase. At higher temperatures, the functional cI857 dimer is destabilized, binding to the oL or oR DNA sequences is abrogated, and mRNA transcription is initiated. An exemplary construct is depicted in in the figures and examples. Inducible expression from the ParaBad can be controlled or further fine-tuned through the optimization of the ribosome binding site (RBS), as described herein.

[0363] In one embodiment, expression of one or more protein(s) of interest is driven directly or indirectly by one or more thermoregulated promoter(s). In some embodiments, the thermoregulated promoter is useful for or induced during in vivo expression of the one or more protein(s) of interest. In some embodiments, expression of one or more protein(s) of interest is driven directly or indirectly by one or more thermoregulated promoter(s) in vitro. In some embodiments, the promoter is directly or indirectly induced by a molecule that is co-administered with the recombinant bacteria, e.g., temperature.

[0364] In some embodiments, expression of one or more protein(s) of interest is driven directly or indirectly by one or more thermoregulated promoter(s) during in vitro growth, preparation, or manufacturing of the strain prior to in vivo administration. In some embodiments, it may be advantageous to shut off production of the one or more protein(s) of interest. This can be done in a thermoregulated system by growing the strain at lower temperatures, e.g., 30° C. Expression can then be induced by elevating the temperature to 37° C. and/or 42° C. In some embodiments, the thermoregulated promoter(s) are induced in culture, e.g., grown in a flask, fermenter or other appropriate culture vessel, e.g., used during cell growth, cell expansion, fermentation, recovery, purification, formulation, and/or manufacture. In some embodiments, the cultures, which are induced by temperatures between 37° C. and 42° C., are grown aerobically. In some embodiments, the cultures, which are induced by induced by temperatures between 37° C. and 42° C., are grown anaerobically.

[0365] In one embodiment, the thermoregulated promoter drives the expression of a construct comprising one or more protein(s) of interest jointly with a second promoter, e.g., a second constitutive or inducible promoter. In some embodiments, two promoters are positioned proximally to the construct and drive its expression, wherein the thermoregulated promoter drives expression under a first set of exogenous conditions, and the second promoter drives the expression under a second set of exogenous conditions.

[0366] In some embodiments, the recombinant bacteria comprise one or more gene sequence(s) having at least 80%, 81%, 82%, 83%, 84%, 85%, 86%, 87%, 88%, 89%, 90%, 91%, 92%, 93%, 94%, 95%, 96%, 97%, 98%, or 99% identity with any of the sequences of SEQ ID NO: 183. In some embodiments, the thermoregulated construct further comprises a gene encoding mutant cI857 repressor, which is divergently transcribed from the same promoter as the one or more one or more protein(s) of interest. In some embodiments, the recombinant bacteria comprise one or more gene sequence(s) having at least 80%, 81%, 82%, 83%, 84%, 85%, 86%, 87%, 88%, 89%, 90%, 91%, 92%, 93%, 94%, 95%, 96%, 97%, 98%, or 99% identity with any of the sequences of SEQ ID NO: 184. In some embodiments, the recombinant bacteria comprise one or more gene sequence(s) encoding a polypeptide having at least 80%, 81%, 82%, 83%, 84%, 85%, 86%, 87%, 88%, 89%, 90%, 91%, 92%, 93%, 94%, 95%, 96%, 97%, 98%, or 99% identity with the polypeptide encoded by any of the sequences of SEQ ID NO: 185.

[0367] In some embodiments, the recombinant bacteria comprise one or more gene sequence(s) which are indirectly inducible through a system driven by the PssB promoter. The Pssb promoter is active under aerobic conditions, and shuts off under anaerobic conditions.

[0368] This promoter can be used to express a gene of interest under aerobic conditions. This promoter can also be used to tightly control the expression of a gene product such that it is only expressed under anaerobic conditions. In this case, the oxygen induced PssB promoter induces the expression of a repressor, which represses the expression of a gene of interest. As a result, the gene of interest is only expressed in the absence of the repressor, i.e., under anaerobic conditions. This strategy has the advantage of an additional level of control for improved fine-tuning and tighter control. FIG. 15A depicts a schematic of the gene organization of a PssB promoter.

[0369] In one embodiment, expression of one or more protein(s) of interest is indirectly regulated by a repressor expressed under the control of one or more PssB promoter(s). In some embodiments, induction of the RssB promoter(s) indirectly drives the in vivo expression of one or more protein(s) of interest. In some embodiments, induction of the RssB promoter(s) indirectly drives the expression of one or more protein(s) of interest during in vitro growth, preparation, or manufacturing of the strain prior to in vivo administration.

[0370] In a non-limiting example, this strategy can be used to control expression of thyA and/or dapA, e.g., to make a conditional auxotroph. The chromosomal copy of dapA or ThyA is knocked out. Under anaerobic conditions, dapA or thyA—as the case may be—are expressed, and the strain can grow in the absence of dap or thymidine. Under aerobic conditions, dapA or thyA expression is shut off, and the strain cannot grow in the absence of dap or thymidine. Such a strategy can, for example be employed to allow survival of bacteria under anaerobic conditions, e.g., the gut, but prevent survival under aerobic conditions (biosafety switch). In some embodiments, the recombinant bacteria comprise one or more gene sequence(s) having at least 80%, 81%, 82%, 83%, 84%, 85%, 86%, 87%, 88%, 89%, 90%, 91%, 92%, 93%, 94%, 95%, 96%, 97%, 98%, or 99% identity with any of the sequences of SEQ ID NO: 188. In some embodiments, the inducible promoters, as described above, drive the expression of one or more protein(s) of interest from a low-copy plasmid or a high copy plasmid or a biosafety system plasmid described herein. In some embodiments, the inducible promoters drive the expression of one or more protein(s) of interest from a construct which is integrated into the bacterial chromosome.

[0371] Constitutive Promoters

[0372] In some embodiments, the gene encoding the payload is present on a plasmid and operably linked to a constitutive promoter. In some embodiments, the gene encoding the payload is present on a chromosome and operably linked to a constitutive promoter.

[0373] In some embodiments, the constitutive promoter is active under in vivo conditions, e.g., the gut, as described herein. In some embodiments, the promoters is active under in vitro conditions, e.g., various cell culture and/or cell manufacturing conditions, as described herein. In some embodiments, the constitutive promoter is active under in vivo conditions, e.g., the gut, as described herein, and under in vitro conditions, e.g., various cell culture and/or cell production and/or manufacturing conditions, as described herein.

[0374] In some embodiments, the constitutive promoter that is operably linked to the gene encoding the payload is active in various exogenous environmental conditions (e.g., in vivo and/or in vitro and/or production/manufacturing conditions).

[0375] In some embodiments, the constitutive promoter is active in exogenous environmental conditions specific to the gut of a mammal. In some embodiments, the constitutive promoter is active in exogenous environmental conditions specific to the small intestine of a mammal. In some embodiments, the constitutive promoter is active in low-oxygen or anaerobic conditions such as the environment of the mammalian gut. In some embodiments, the constitutive promoter is active in the presence of molecules or metabolites that are specific to the gut of a mammal. In some embodiments, the constitutive promoter is directly or indirectly induced by a molecule that is co-administered with the bacterial cell. In some embodiments, the constitutive promoter is active in the presence of molecules or metabolites or other conditions, that are present during in vitro culture, cell production and/or manufacturing conditions.

[0376] Bacterial constitutive promoters are known in the art. Exemplary constitutive promoters include E. coli σ70, such as BBa_I14034 (SEQ ID NO: 189), BBa_J732021 (SEQ ID NO: 190), BBa_J742126 (SEQ ID NO: 191), BBa_J01006 (SEQ ID NO: 192), BBa_J23100 (SEQ ID NO: 193), BBa_J23101 (SEQ ID NO: 194), BBa_J23102 (SEQ ID NO: 195), BBa_J23103 (SEQ ID NO: 196), BBa_J23104 (SEQ ID NO: 197), BBa_J23105 (SEQ ID NO: 198), BBa_J23106 (SEQ ID NO: 199), BBa_J23107 (SEQ ID NO: 200), BBa_J23108 (SEQ ID NO: 201), BBa_J23109 (SEQ ID NO: 202), BBa_J23110 (SEQ ID NO: 203), BBa_J23111 (SEQ ID NO: 204), BBa_J23112 (SEQ ID NO: 205), BBa_J23113 (SEQ ID NO: 206), BBa_J23114 (SEQ ID NO: 207), BBa_J23115 (SEQ ID NO: 208), BBa_J23116 (SEQ ID NO: 209), BBa_J23117 (SEQ ID NO: 210), BBa_J23118 (SEQ ID NO: 211), BBa_J23119 (SEQ ID NO: 212), BBa_J23150 (SEQ ID NO: 213), BBa_J23151 (SEQ ID NO: 214), BBa_J44002 (SEQ ID NO: 215), BBa_J48104 (SEQ ID NO: 216), BBa_J54200 (SEQ ID NO: 217), BBa_J56015 (SEQ ID NO: 218), BBa_J64951 (SEQ ID NO: 219), BBa_K088007 (SEQ ID NO: 220), BBa_K119000 (SEQ ID NO: 221), BBa_K119001 (SEQ ID NO: 222), BBa_K1330002 (SEQ ID NO: 223), BBa_K137029 (SEQ ID NO: 224), BBa_K137030 (SEQ ID NO: 225), BBa_K137031 (SEQ ID NO: 226), BBa_K137032 (SEQ ID NO: 227), BBa_K137085 (SEQ ID NO: 228), BBa_K137086 (SEQ ID NO: 229), BBa_K137087 (SEQ ID NO: 230), BBa_K137088 (SEQ ID NO: 231), BBa_K137089 (SEQ ID NO: 232), BBa_K137090 (SEQ ID NO: 233), BBa_K137091 (SEQ ID NO: 234), BBa_K1585100 (SEQ ID NO: 235), BBa_K1585101 (SEQ ID NO: 236), BBa_K1585102 (SEQ ID NO: 237), BBa_K1585103 (SEQ ID NO: 238), BBa_K1585104 (SEQ ID NO: 239), BBa_K1585105 (SEQ ID NO: 240), BBa_K1585106 (SEQ ID NO: 241), BBa_K1585110 (SEQ ID NO: 242), BBa_K1585113 (SEQ ID NO: 243), BBa_K1585115 (SEQ ID NO: 244), BBa_K1585116 (SEQ ID NO: 245), BBa_K1585117 (SEQ ID NO: 246), BBa_K1585118 (SEQ ID NO: 247), BBa_K1585119 (SEQ ID NO: 248), BBa_K1824896 (SEQ ID NO: 249), BBa_K256002 (SEQ ID NO: 250), BBa_K256018 (SEQ ID NO: 251), BBa_K256020 (SEQ ID NO: 252), BBa_K256033 (SEQ ID NO: 253), BBa_K292000 (SEQ ID NO: 254), BBa_K292001 (SEQ ID NO: 255), BBa_K418000 (SEQ ID NO: 256), BBa_K418002 (SEQ ID NO: 257), BBa_K418003 (SEQ ID NO: 258), BBa_K823004 (SEQ ID NO: 259), BBa_K823005 (SEQ ID NO: 260), BBa_K823006 (SEQ ID NO: 261), BBa_K823007 (SEQ ID NO: 262), BBa_K823008 (SEQ ID NO: 263), BBa_K823010 (SEQ ID NO: 264), BBa_K823011 (SEQ ID NO: 265), BBa_K823013 (SEQ ID NO: 266), BBa_K823014 (SEQ ID NO: 267), BBa_M13101 (SEQ ID NO: 268), BBa_M13102 (SEQ ID NO: 269), BBa_M13103 (SEQ ID NO: 270), BBa_M13104 (SEQ ID NO: 271), BBa_M13105 (SEQ ID NO: 272), BBa_M13106 (SEQ ID NO: 273), BBa_M13108 (SEQ ID NO: 274), BBa_M13110 (SEQ ID NO: 275), BBa_M31519 (SEQ ID NO: 276), BBa_R1074 (SEQ ID NO: 277), BBa_R1075 (SEQ ID NO: 278), BBa_503331 (SEQ ID NO: 279), BBa_I14018 (SEQ ID NO: 280), and BBa_I14033 (SEQ ID NO: 281). Exemplary constitutive promoters include E. coli σS promoters, e.g., BBa_J45992 (SEQ ID NO: 282), and BBa_J45993 (SEQ ID NO: 283). Exemplary constitutive promoters further include constitutive E. coli σ32 promoters, e.g, BBa_J45504 (SEQ ID NO: 284), BBa_K1895002 (SEQ ID NO: 285), and BBa_K1895003 (SEQ ID NO: 286). Exemplary constitutive promoters further include constitutive B. subtilis σA promoters, e.g., BBa_K780003 (SEQ ID NO: 287), BBa_K823000 (SEQ ID NO: 288), BBa_K823002 (SEQ ID NO: 289), and BBa_K823003 (SEQ ID NO: 290), BBa_K14301 (SEQ ID NO: 291), BBa_K143013 (SEQ ID NO: 292). Exemplary constitutive promoters further include constitutive B. subtilis σB promoters, e.g., BBa_K143010 (SEQ ID NO: 291), BBa_K143011 (SEQ ID NO: 292), BBa_K143013 (SEQ ID NO: 293). Exemplary constitutive promoters further include BBa_K112706 (SEQ ID NO: 294) and BBa_K112707 (SEQ ID NO: 295) promoters.

[0377] Exemplary promoters from Bacteriophage T7 or SP6 or various prokaryotes include BBa_K143010 (SEQ ID NO: 293), BBa_K143011 (SEQ ID NO: 294), BBa_K143013 (SEQ ID NO: 295), BBa_J712074 (SEQ ID NO: 296), BBa_J719005 (SEQ ID NO: 297), BBa_J34814 (SEQ ID NO: 298), BBa_J64997 (SEQ ID NO: 299), BBa_K113010 (SEQ ID NO: 300), BBa_K113011 (SEQ ID NO: 301), BBa_K113012 (SEQ ID NO: 302), BBa_K1614000 (SEQ ID NO: 303), BBa_R0085 (SEQ ID NO: 304), BBa_R0180 (SEQ ID NO: 305), BBa_R0181 (SEQ ID NO: 306), BBa_R0182 (SEQ ID NO: 307), BBa_R0183 (SEQ ID NO: 308), BBa_Z0251 (SEQ ID NO: 309), BBa_Z0252 (SEQ ID NO: 310), BBa_Z0253 (SEQ ID NO: 311), BBa_J64998 (SEQ ID NO: 312), BBa_K112706 (SEQ ID NO: 313), BBa_K112707 (SEQ ID NO: 314). Exemplary promoters from yeast and various eukaryotes include BBa_I766557 (SEQ ID NO: 315), BBa_J63005 (SEQ ID NO: 316), BBa_K105027 (SEQ ID NO: 317), BBa_K105028 (SEQ ID NO: 318), BBa_K105029 (SEQ ID NO: 319), BBa_K105030 (SEQ ID NO: 320), BBa_K105031 (SEQ ID NO: 321), BBa_K122000), SEQ ID NO: 322), BBa_K124000 (SEQ ID NO: 323), BBa_K124002 (SEQ ID NO: 324), BBa_K319005 (SEQ ID NO: 325), BBa_M31201 (SEQ ID NO: 326), BBa_J766555 (SEQ ID NO: 327), BBa_I766556 (SEQ ID NO: 328), BBa_J712004 (SEQ ID NO: 329), and BBa_K076017 (SEQ ID NO: 330).

[0378] Additional exemplary promoters are listed in Table 8.

TABLE 8
Exemplary constitutive Promoters

| Name | Description |
|---|---|
| Plpp | The Plpp promoter is a natural promoter taken from the Nissle genome. |
| SEQ ID NO: 331 | In situ it is used to drive production of lpp, which is known to be the |
| | most abundant protein in the cell. Also, in some previous RNAseq |
| | experiments I was able to confirm that the lpp mRNA is one of the |
| | most abundant mRNA in Nissle during exponential growth. |
| PapFAB46 | See, e.g., Kosuri, S., Goodman, D. B. & Cambray, G. Composability of |
| SEQ ID NO: 332 | regulatory sequences controlling transcription and translation in |
| | Escherichia coli. in 1-20 (2013). doi: 10.1073/pnas. |
| PJ23101 + UP | UP element helps recruit RNA polymerase |
| element | (ggaaaatttttttaaaaaaaaaac (SEQ ID NO: 1087)) |
| SEQ ID NO: 333 | |
| PJ23107 + UP | UP element helps recruit RNA polymerase |
| element | (ggaaaatttttttaaaaaaaaaac (SEQ ID NO: 1087)) |
| SEQ ID NO: 334 | |
| PSYN23119 | UP element at 5′ end; consensus -10 region is TATAAT; the consensus |
| SEQ ID NO: 335 | -35 is TTGACA; the extended -10 region is generally TGNTATAAT |
| | (TGGTATAAT in this sequence) |

[0379] Bacterial constitutive promoters are known in the art. In some embodiments, the constitutive promoter is at least about 880%, 85%, 90%, 95%, or 99% homologous to the sequence of any one of SEQ ID NOs: 187-343.

[0380] Ribosome Binding Sites

[0381] In some embodiments, ribosome binding sites are added, switched out or replaced. By testing a few ribosome binding sites, expression levels can be fine-tuned to the desired level. Various RBS are suitable for prokaryotic expression and can be used to achieve the desired expression levels (See, e.g., Registry of standard biological parts). Exemplary ribosome binding sites include those derived from Master sequence SEQ ID NO: 336. Non limiting examples of such ribosome binding sites include BBa_J61100, BBa_J61101, BBa_J61102, BBa_J61103, BBa_J61104, BBa_J61105, BBa_J61106, BBa_J61107, BBa_J61108, BBa_J61109, BBa_J61110, BBa_J61111, BBa_J61112, BBa_J61113, BBa_J61114, BBa_J61115, BBa_J61116, BBa_J61117, BBa_J61118, BBa_J61119, BBa_J61120, BBa_J61121, BBa_J61122, BBa_J61123, BBa_J61124, BBa_J61125, BBa_J61126, BBa_J61127, BBa_J61128, BBa_J6112, BBa_J61130, BBa_J61131, BBa_J61132, BBa_J61133, BBa_J61134, BBa_J61135, BBa_J61136, BBa_J61137, BBa_J61138, BBa_J61139, BBa_B0029, BBa_B0030, BBa_B0031, BBa_B0032, BBa_B0033, BBa_B0034, BBa_B0035, and BBa_B0064 (SEQ ID NO: 336-384).

### Nucleic Acids

[0382] In some embodiments, the disclosure provides novel nucleic acids for producing and secreting GLP-2. In some embodiments, the nucleic acid encodes one or more GLP-2 or GLP-2 fusion protein polypeptides. Thus, in some embodiments, the nucleic acid comprises gene sequence(s) encoding one or more GLP-2 or GLP-2 fusion protein polypeptides. In some embodiments, the one or more GLP-2 or GLP-2 fusion protein polypeptide(s) is selected from any of SEQ ID NOs: 499-514 and 537-546. In some embodiments, the nucleic acid comprises one or more GLP-2 or GLP-2 fusion protein cassettes. In some embodiments, the nucleic acid comprises gene sequence comprising one or more GLP-2 or GLP-2 fusion protein genes selected from SEQ ID NO: 515-536 and 551-562.

[0383] In some embodiments, the nucleic acid comprises gene sequence encoding a human GLP-2 polypeptide. In certain embodiments, the human GLP-2 polypeptide has at least about 80%, 85%, 90%, 95%, or 99% identity with SEQ ID NO: 148. In some embodiments, the human GLP-2 polypeptide has at least about 85%, 86%, 87%, 88%, 89%, 90%, 91%, 92%, 93%, 94%, 95%, 96%, 97%, 98%, or 99% identity with SEQ ID NO: 148. In some specific embodiments, the human GLP-2 polypeptide comprises SEQ ID NO: 148. In other specific embodiments, the human GLP-2 polypeptide consists of SEQ ID NO: 148. In some embodiments, the nucleic acid comprises a gene sequence. In certain embodiments, the nucleic acid comprising the human GLP-2 gene sequence has at least about 80%, 85%, 90%, 95%, or 99% identity with SEQ ID NO: 523. In some embodiments, the nucleic acid comprising the human GLP-2 gene sequence has at least about 85%, 86%, 87%, 88%, 89%, 90%, 91%, 92%, 93%, 94%, 95%, 96%, 97%, 98%, or 99% identity with SEQ ID NO: 523. In some specific embodiments, the nucleic acid comprising the human GLP-2 gene sequence comprises SEQ ID NO: 523. In other specific embodiments the nucleic acid comprising the human GLP-2 gene sequence consists of SEQ ID NO: 523.

[0384] In some embodiments, the nucleic acid comprises gene sequence encoding a Fc (IgA) polypeptide. In certain embodiments, the Fc (IgA) polypeptide has at least about 80%, 85%, 90%, 95%, or 99% identity with SEQ ID NO: 499. In some embodiments, the Fc (IgA) polypeptide has at least about 85%, 86%, 87%, 88%, 89%, 90%, 91%, 92%, 93%, 94%, 95%, 96%, 97%, 98%, or 99% identity with SEQ ID NO: 499. In some specific embodiments, the Fc (IgA) polypeptide comprises SEQ ID NO: 499. In other specific embodiments, the Fc (IgA) polypeptide consists of SEQ ID NO: 499. In some embodiments, the nucleic acid comprises a gene sequence. In certain embodiments, the nucleic acid comprising the Fc (IgA) gene sequence has at least about 80%, 85%, 90%, 95%, or 99% identity with SEQ ID NO: 527. In some embodiments, the nucleic acid comprising the Fc (IgA) gene sequence has at least about 85%, 86%, 87%, 88%, 89%, 90%, 91%, 92%, 93%, 94%, 95%, 96%, 97%, 98%, or 99% identity with SEQ ID NO: 527. In some specific embodiments, the nucleic acid comprising the Fc (IgA) gene sequence comprises SEQ ID NO: 527. In other specific embodiments the nucleic acid comprising the Fc (IgA) gene sequence consists of SEQ ID NO: 527.

[0385] In some embodiments, the nucleic acid comprises a gene sequence. In certain embodiments, the nucleic acid comprising the Fc (IgA) gene sequence has at least about 80%, 85%, 90%, 95%, or 99% identity with SEQ ID NO: 528. In some embodiments, the nucleic acid comprising the Fc (IgA) gene sequence has at least about 85%, 86%, 87%, 88%, 89%, 90%, 91%, 92%, 93%, 94%, 95%, 96%, 97%, 98%, or 99% identity with SEQ ID NO: 528. In some specific embodiments, the nucleic acid comprising the Fc (IgA) gene sequence comprises SEQ ID NO: 528. In other specific embodiments the nucleic acid comprising the Fc (IgA) gene sequence consists of SEQ ID NO: 528.

[0386] In some embodiments, the nucleic acid comprises gene sequence encoding a Linker polypeptide. In certain embodiments, the Linker polypeptide has at least about 80%, 85%, 90%, 95%, or 99% identity with SEQ ID NO: 509. In some embodiments, the Linker polypeptide has at least about 85%, 86%, 87%, 88%, 89%, 90%, 91%, 92%, 93%, 94%, 95%, 96%, 97%, 98%, or 99% identity with SEQ ID NO: 509. In some specific embodiments, the Linker polypeptide comprises SEQ ID NO: 509. In other specific embodiments, the Linker polypeptide consists of SEQ ID NO: 509. In some embodiments, the nucleic acid comprises a gene sequence. In certain embodiments, the nucleic acid comprising the LINKER gene sequence has at least about 80%, 85%, 90%, 95%, or 99% identity with SEQ ID NO: 524. In some embodiments, the nucleic acid comprising the Linker gene sequence has at least about 85%, 86%, 87%, 88%, 89%, 90%, 91%, 92%, 93%, 94%, 95%, 96%, 97%, 98%, or 99% identity with SEQ ID NO: 524. In some specific embodiments, the nucleic acid comprising the Linker gene sequence comprises SEQ ID NO: 524. In other specific embodiments the nucleic acid comprising the linker gene sequence consists of SEQ ID NO: 524.

[0387] In some embodiments, the nucleic acid comprises gene sequence encoding a glp2-linker Fc (IgA) polypeptide. In certain embodiments, the glp2-linker Fc (IgA) polypeptide has at least about 80%, 85%, 90%, 95%, or 99% identity with SEQ ID NO: 537. In some embodiments, the glp2-linker Fc (IgA) polypeptide has at least about 85%, 86%, 87%, 88%, 89%, 90%, 91%, 92%, 93%, 94%, 95%, 96%, 97%, 98%, or 99% identity with SEQ ID NO: 537. In some specific embodiments, the glp2-linker Fc (IgA) polypeptide comprises SEQ ID NO: 537. In other specific embodiments, the glp2-linker Fc (IgA) polypeptide consists of SEQ ID NO: 537. In some embodiments, the nucleic acid comprises a gene sequence. In certain embodiments, the nucleic acid comprising the glp2-linker Fc (IgA) gene sequence has at least about 80%, 85%, 90%, 95%, or 99% identity with SEQ ID NO: 547. In some embodiments, the nucleic acid comprising the glp2-linker Fc (IgA) gene sequence has at least about 85%, 86%, 87%, 88%, 89%, 90%, 91%, 92%, 93%, 94%, 95%, 96%, 97%, 98%, or 99% identity with SEQ ID NO: 547. In some specific embodiments, the nucleic acid comprising the glp2-linker Fc (IgA) gene sequence comprises SEQ ID NO: 547. In other specific embodiments the nucleic acid comprising the glp2-linker Fc (IgA) gene sequence consists of SEQ ID NO: 547. In certain embodiments, the nucleic acid comprising the glp2-linker Fc (IgA) gene sequence has at least about 80%, 85%, 90%, 95%, or 99% identity with SEQ ID NO: 548. In some embodiments, the nucleic acid comprising the glp2-linker Fc (IgA) gene sequence has at least about 85%, 86%, 87%, 88%, 89%, 90%, 91%, 92%, 93%, 94%, 95%, 96%, 97%, 98%, or 99% identity with SEQ ID NO: 548. In some specific embodiments, the nucleic acid comprising the glp2-linker Fc (IgA) gene sequence comprises SEQ ID NO: 548. In other specific embodiments the nucleic acid comprising the glp2-linker Fc (IgA) gene sequence consists of SEQ ID NO: 548.

[0388] In some embodiments, the nucleic acid comprises gene sequence encoding a PhoA-GLP-2 polypeptide. In certain embodiments, the PhoA-GLP-2 polypeptide has at least about 80%, 85%, 90%, 95%, or 99% identity with SEQ ID NO: 538. In some embodiments, the PhoA-GLP-2 polypeptide has at least about 85%, 86%, 87%, 88%, 89%, 90%, 91%, 92%, 93%, 94%, 95%, 96%, 97%, 98%, or 99% identity with SEQ ID NO: 538. In some specific embodiments, the PhoA-GLP-2 polypeptide comprises SEQ ID NO: 538. In other specific embodiments, the PhoA-GLP-2 polypeptide consists of SEQ ID NO: 538. In some embodiments, the nucleic acid comprises a gene sequence. In certain embodiments, the nucleic acid comprising the PhoA-GLP-2 gene sequence has at least about 80%, 85%, 90%, 95%, or 99% identity with SEQ ID NO: 549. In some embodiments, the nucleic acid comprising the PhoA-GLP-2 gene sequence has at least about 85%, 86%, 87%, 88%, 89%, 90%, 91%, 92%, 93%, 94%, 95%, 96%, 97%, 98%, or 99% identity with SEQ ID NO: 549.

[0389] In some embodiments, the nucleic acid comprises gene sequence encoding a PhoA-GLP-2-Fc (hIgA) polypeptide. In certain embodiments, the PhoA-GLP-2-Fc (hIgA) polypeptide has at least about 80%, 85%, 90%, 95%, or 99% identity with SEQ ID NO: 511. In some embodiments, the PhoA-GLP-2-Fc (hIgA) polypeptide has at least about 85%, 86%, 87%, 88%, 89%, 90%, 91%, 92%, 93%, 94%, 95%, 96%, 97%, 98%, or 99% identity with SEQ ID NO: 511. In some specific embodiments, the PhoA-GLP-2-Fc (hIgA) polypeptide comprises SEQ ID NO: 511. In other specific embodiments, the PhoA-GLP-2-Fc (hIgA) polypeptide consists of SEQ ID NO: 511. In some embodiments, the nucleic acid comprises gene sequence encoding a PhoA-GLP-2-Fc (hIgA) polypeptide. In certain embodiments, the PhoA-GLP-2-Fc (hIgA) polypeptide has at least about 80%, 85%, 90%, 95%, or 99% identity with SEQ ID NO: 512. In some embodiments, the PhoA-GLP-2-Fc (hIgA) polypeptide has at least about 85%, 86%, 87%, 88%, 89%, 90%, 91%, 92%, 93%, 94%, 95%, 96%, 97%, 98%, or 99% identity with SEQ ID NO: 512. In some specific embodiments, the PhoA-GLP-2-Fc (hIgA) polypeptide comprises SEQ ID NO: 512. In other specific embodiments, the PhoA-GLP-2-Fc (hIgA) polypeptide consists of SEQ ID NO: 512. In some embodiments, the nucleic acid comprises a gene sequence. In certain embodiments, the nucleic acid comprising the PhoA-GLP-2-Fc (hIgA) gene sequence has at least about 80%, 85%, 90%, 95%, or 99% identity with SEQ ID NO: 528. In some embodiments, the nucleic acid comprising the PhoA-GLP-2-Fc (hIgA) gene sequence has at least about 85%, 86%, 87%, 88%, 89%, 90%, 91%, 92%, 93%, 94%, 95%, 96%, 97%, 98%, or 99% identity with SEQ ID NO: 528. In some specific embodiments, the nucleic acid comprising the PhoA-GLP-2-Fc (hIgA) gene sequence comprises SEQ ID NO: 528. In other specific embodiments the nucleic acid comprising the PhoA-GLP-2-Fc (hIgA) gene sequence consists of SEQ ID NO: 528.

[0390] In certain embodiments, the nucleic acid comprising the PhoA-GLP-2-Fc (hIgA) gene sequence has at least about 80%, 85%, 90%, 95%, or 99% identity with SEQ ID NO: 529. In some embodiments, the nucleic acid comprising the PhoA-GLP-2-Fc (hIgA) gene sequence has at least about 85%, 86%, 87%, 88%, 89%, 90%, 91%, 92%, 93%, 94%, 95%, 96%, 97%, 98%, or 99% identity with SEQ ID NO: 529. In some specific embodiments, the nucleic acid comprising the PhoA-GLP-2-Fc (hIgA) gene sequence comprises SEQ ID NO: 529. In other specific embodiments the nucleic acid comprising the PhoA-GLP-2-Fc (hIgA) gene sequence consists of SEQ ID NO: 529.

[0391] In some embodiments, the nucleic acid comprises a gene sequence. In certain embodiments, the nucleic acid comprising the PhoA-GLP-2-Fc (hIgA) gene sequence has at least about 80%, 85%, 90%, 95%, or 99% identity with SEQ ID NO: 530. In some embodiments, the nucleic acid comprising the PhoA-GLP-2-Fc (hIgA) gene sequence has at least about 85%, 86%, 87%, 88%, 89%, 90%, 91%, 92%, 93%, 94%, 95%, 96%, 97%, 98%, or 99% identity with SEQ ID NO: 530. In some specific embodiments, the nucleic acid comprising the PhoA-GLP-2-Fc (hIgA) gene sequence comprises SEQ ID NO: 530. In other specific embodiments the nucleic acid comprising the PhoA-GLP-2-Fc (hIgA) gene sequence consists of SEQ ID NO: 530.

[0392] In some embodiments, the nucleic acid comprises a gene sequence. In certain embodiments, the nucleic acid comprising the PhoA-GLP-2-Fc (hIgA) gene sequence has at least about 80%, 85%, 90%, 95%, or 99% identity with SEQ ID NO: 531. In some embodiments, the nucleic acid comprising the PhoA-GLP-2-Fc (hIgA) gene sequence has at least about 85%, 86%, 87%, 88%, 89%, 90%, 91%, 92%, 93%, 94%, 95%, 96%, 97%, 98%, or 99% identity with SEQ ID NO: 531. In some specific embodiments, the nucleic acid comprising the PhoA-GLP-2-Fc (hIgA) gene sequence comprises SEQ ID NO: 531. In other specific embodiments the nucleic acid comprising the PhoA-GLP-2-Fc (hIgA) gene sequence consists of SEQ ID NO: 531.

[0393] In some embodiments, the nucleic acid comprises gene sequence encoding a ECOLIN 19410-GLP-2 polypeptide. In certain embodiments, the ECOLIN 19410-GLP-2 polypeptide has at least about 80%, 85%, 90%, 95%, or 99% identity with SEQ ID NO: 539. In some embodiments, the ECOLIN 19410-GLP-2 polypeptide has at least about 85%, 86%, 87%, 88%, 89%, 90%, 91%, 92%, 93%, 94%, 95%, 96%, 97%, 98%, or 99% identity with SEQ ID NO: 539. In some specific embodiments, the ECOLIN 19410-GLP-2 polypeptide comprises SEQ ID NO: 539. In other specific embodiments, the ECOLIN 19410-GLP-2 polypeptide consists of SEQ ID NO: 539. In some embodiments, the nucleic acid comprises a gene sequence. In certain embodiments, the nucleic acid comprising the ECOLIN 19410-GLP-2 gene sequence has at least about 80%, 85%, 90%, 95%, or 99% identity with SEQ ID NO: 550. In some embodiments, the nucleic acid comprising the ECOLIN 19410-GLP-2 gene sequence has at least about 85%, 86%, 87%, 88%, 89%, 90%, 91%, 92%, 93%, 94%, 95%, 96%, 97%, 98%, or 99% identity with SEQ ID NO: 550. In some specific embodiments, the nucleic acid comprising the ECOLIN 19410-GLP-2 gene sequence comprises SEQ ID NO: 550. In other specific embodiments the nucleic acid comprising the ECOLIN 19410-GLP-2 gene sequence consists of SEQ ID NO: 550.

[0394] In some embodiments, the nucleic acid comprises gene sequence encoding a ECOLIN 19410-GLP-2-Fc (hIgA) polypeptide. In certain embodiments, the ECOLIN 19410-GLP-2-Fc (hIgA) polypeptide has at least about 80%, 85%, 90%, 95%, or 99% identity with SEQ ID NO: 513. In some embodiments, the ECOLIN 19410-GLP-2-Fc (hIgA) polypeptide has at least about 85%, 86%, 87%, 88%, 89%, 90%, 91%, 92%, 93%, 94%, 95%, 96%, 97%, 98%, or 99% identity with SEQ ID NO: 513. In some specific embodiments, the ECOLIN 19410-GLP-2-Fc (hIgA) polypeptide comprises SEQ ID NO: 513. In other specific embodiments, the ECOLIN 19410-GLP-2-Fc (hIgA) polypeptide consists of SEQ ID NO: 513. In some embodiments, the nucleic acid comprises gene sequence encoding a ECOLIN 19410-GLP-2-Fc (hIgA) polypeptide. In certain embodiments, the ECOLIN 19410-GLP-2-Fc (hIgA) polypeptide has at least about 80%, 85%, 90%, 95%, or 99% identity with SEQ ID NO: 514. In some embodiments, the ECOLIN 19410-GLP-2-Fc (hIgA) polypeptide has at least about 85%, 86%, 87%, 88%, 89%, 90%, 91%, 92%, 93%, 94%, 95%, 96%, 97%, 98%, or 99% identity with SEQ ID NO: 514. In some specific embodiments, the ECOLIN 19410-GLP-2-Fc (hIgA) polypeptide comprises SEQ ID NO: 514. In other specific embodiments, the ECOLIN 19410-GLP-2-Fc (hIgA) polypeptide consists of SEQ ID NO: 514.

[0395] In some embodiments, the nucleic acid comprises a gene sequence. In certain embodiments, the nucleic acid comprising the ECOLIN 19410-GLP-2-Fc (hIgA) gene sequence has at least about 80%, 85%, 90%, 95%, or 99% identity with SEQ ID NO: 533. In some embodiments, the nucleic acid comprising the ECOLIN 19410-GLP-2-Fc (hIgA) gene sequence has at least about 85%, 86%, 87%, 88%, 89%, 90%, 91%, 92%, 93%, 94%, 95%, 96%, 97%, 98%, or 99% identity with SEQ ID NO: 533. In some specific embodiments, the nucleic acid comprising the ECOLIN 19410-GLP-2-Fc (hIgA) gene sequence comprises SEQ ID NO: 533. In other specific embodiments the nucleic acid comprising the ECOLIN 19410-GLP-2-Fc (hIgA) gene sequence consists of SEQ ID NO: 533.

[0396] In some embodiments, the nucleic acid comprises a gene sequence. In certain embodiments, the nucleic acid comprising the ECOLIN 19410-GLP-2-Fc (hIgA) gene sequence has at least about 80%, 85%, 90%, 95%, or 99% identity with SEQ ID NO: 534. In some embodiments, the nucleic acid comprising the ECOLIN 19410-GLP-2-Fc (hIgA) gene sequence has at least about 85%, 86%, 87%, 88%, 89%, 90%, 91%, 92%, 93%, 94%, 95%, 96%, 97%, 98%, or 99% identity with SEQ ID NO: 534. In some specific embodiments, the nucleic acid comprising the ECOLIN 19410-GLP-2-Fc (hIgA) gene sequence comprises SEQ ID NO: 534. In other specific embodiments the nucleic acid comprising the ECOLIN 19410-GLP-2-Fc (hIgA) gene sequence consists of SEQ ID NO: 534.

[0397] In some embodiments, the nucleic acid comprises a gene sequence. In certain embodiments, the nucleic acid comprising the ECOLIN 19410-GLP-2-Fc (hIgA) gene sequence has at least about 80%, 85%, 90%, 95%, or 99% identity with SEQ ID NO: 535. In some embodiments, the nucleic acid comprising the ECOLIN 19410-GLP-2-Fc (hIgA) gene sequence has at least about 85%, 86%, 87%, 88%, 89%, 90%, 91%, 92%, 93%, 94%, 95%, 96%, 97%, 98%, or 99% identity with SEQ ID NO: 535. In some specific embodiments, the nucleic acid comprising the ECOLIN 19410-GLP-2-Fc (hIgA) gene sequence comprises SEQ ID NO: 535. In other specific embodiments the nucleic acid comprising the ECOLIN 19410-GLP-2-Fc (hIgA) gene sequence consists of SEQ ID NO: 535.

[0398] In some embodiments, the nucleic acid comprises a gene sequence. In certain embodiments, the nucleic acid comprising the ECOLIN 19410-GLP-2-Fc (hIgA) gene sequence has at least about 80%, 85%, 90%, 95%, or 99% identity with SEQ ID NO: 536. In some embodiments, the nucleic acid comprising the ECOLIN 19410-GLP-2-Fc (hIgA) gene sequence has at least about 85%, 86%, 87%, 88%, 89%, 90%, 91%, 92%, 93%, 94%, 95%, 96%, 97%, 98%, or 99% identity with SEQ ID NO: 536. In some specific embodiments, the nucleic acid comprising the ECOLIN 19410-GLP-2-Fc (hIgA) gene sequence comprises SEQ ID NO: 536. In other specific embodiments the nucleic acid comprising the ECOLIN 19410-GLP-2-Fc (hIgA) gene sequence consists of SEQ ID NO: 536.

[0399] In some embodiments, the nucleic acid comprises gene sequence encoding a mutated GLP-2 polypeptide. In certain embodiments, the mutated GLP-2 polypeptide has at least about 80%, 85%, 90%, 95%, or 99% identity with SEQ ID NO: 149. In some embodiments, the mutated GLP-2 polypeptide has at least about 85%, 86%, 87%, 88%, 89%, 90%, 91%, 92%, 93%, 94%, 95%, 96%, 97%, 98%, or 99% identity with SEQ ID NO: 149. In some specific embodiments, the mutated GLP-2 polypeptide comprises SEQ ID NO: 149. In other specific embodiments, the mutated GLP-2 polypeptide consists of SEQ ID NO: 149. In some embodiments, the nucleic acid comprises a gene sequence. In certain embodiments, the nucleic acid comprising the mutated GLP-2 gene sequence has at least about 80%, 85%, 90%, 95%, or 99% identity with SEQ ID NO: 526. In some embodiments, the nucleic acid comprising the mutated GLP-2 gene sequence has at least about 85%, 86%, 87%, 88%, 89%, 90%, 91%, 92%, 93%, 94%, 95%, 96%, 97%, 98%, or 99% identity with SEQ ID NO: 526. In some specific embodiments, the nucleic acid comprising the mutated GLP-2 gene sequence comprises SEQ ID NO: 526. In other specific embodiments the nucleic acid comprising the mutated GLP-2 gene sequence consists of SEQ ID NO: 526.

[0400] In some embodiments, the nucleic acid comprises gene sequence encoding a mutated glp2-linker Fc (IgA) polypeptide. In certain embodiments, the mutated glp2-linker Fc (IgA) polypeptide has at least about 80%, 85%, 90%, 95%, or 99% identity with SEQ ID NO: 540. In some embodiments, the mutated glp2-linker Fc (IgA) polypeptide has at least about 85%, 86%, 87%, 88%, 89%, 90%, 91%, 92%, 93%, 94%, 95%, 96%, 97%, 98%, or 99% identity with SEQ ID NO: 540. In some specific embodiments, the mutated glp2-linker Fc (IgA) polypeptide comprises SEQ ID NO: 540. In other specific embodiments, the mutated glp2-linker Fc (IgA) polypeptide consists of SEQ ID NO: 540. In some embodiments, the nucleic acid comprises a gene sequence. In certain embodiments, the nucleic acid comprising the mutated glp2-linker Fc (IgA) gene sequence has at least about 80%, 85%, 90%, 95%, or 99% identity with SEQ ID NO: 559. In some embodiments, the nucleic acid comprising the mutated glp2-linker Fc (IgA) gene sequence has at least about 85%, 86%, 87%, 88%, 89%, 90%, 91%, 92%, 93%, 94%, 95%, 96%, 97%, 98%, or 99% identity with SEQ ID NO: 559. In some specific embodiments, the nucleic acid comprising the mutated glp2-linker Fc (IgA) gene sequence comprises SEQ ID NO: 559. In other specific embodiments the nucleic acid comprising the mutated glp2-linker Fc (IgA) gene sequence consists of SEQ ID NO: 559. In certain embodiments, the nucleic acid comprising the mutated glp2-linker Fc (IgA) gene sequence has at least about 80%, 85%, 90%, 95%, or 99% identity with SEQ ID NO: 560. In some embodiments, the nucleic acid comprising the mutated glp2-linker Fc (IgA) gene sequence has at least about 85%, 86%, 87%, 88%, 89%, 90%, 91%, 92%, 93%, 94%, 95%, 96%, 97%, 98%, or 99% identity with SEQ ID NO: 560. In some specific embodiments, the nucleic acid comprising the mutated glp2-linker Fc (IgA) gene sequence comprises SEQ ID NO: 560. In other specific embodiments the nucleic acid comprising the mutated glp2-linker Fc (IgA) gene sequence consists of SEQ ID NO: 560.

[0401] In some embodiments, the nucleic acid comprises gene sequence encoding a PhoA-mutated GLP-2 polypeptide. In certain embodiments, the PhoA-mutated GLP-2 polypeptide has at least about 80%, 85%, 90%, 95%, or 99% identity with SEQ ID NO: 541. In some embodiments, the PhoA-mutated GLP-2 polypeptide has at least about 85%, 86%, 87%, 88%, 89%, 90%, 91%, 92%, 93%, 94%, 95%, 96%, 97%, 98%, or 99% identity with SEQ ID NO: 541. In some specific embodiments, the PhoA-mutated GLP-2 polypeptide comprises SEQ ID NO: 541. In other specific embodiments, the PhoA-mutated GLP-2 polypeptide consists of SEQ ID NO: 541. In some embodiments, the nucleic acid comprises a gene sequence. In certain embodiments, the nucleic acid comprising the PhoA-mutated GLP-2 gene sequence has at least about 80%, 85%, 90%, 95%, or 99% identity with SEQ ID NO: 561. In some embodiments, the nucleic acid comprising the PhoA-mutated GLP-2 gene sequence has at least about 85%, 86%, 87%, 88%, 89%, 90%, 91%, 92%, 93%, 94%, 95%, 96%, 97%, 98%, or 99% identity with SEQ ID NO: 561. In some specific embodiments, the nucleic acid comprising the PhoA-mutated GLP-2 gene sequence comprises SEQ ID NO: 561. In other specific embodiments the nucleic acid comprising the PhoA-mutated GLP-2 gene sequence consists of SEQ ID NO: 561.

[0402] In some embodiments, the nucleic acid comprises gene sequence encoding a PhoA-mutated GLP-2-Fc (hIgA) polypeptide. In certain embodiments, the PhoA-mutated GLP-2-Fc (hIgA) polypeptide has at least about 80%, 85%, 90%, 95%, or 99% identity with SEQ ID NO: 543. In some embodiments, the PhoA-mutated GLP-2-Fc (hIgA) polypeptide has at least about 85%, 86%, 87%, 88%, 89%, 90%, 91%, 92%, 93%, 94%, 95%, 96%, 97%, 98%, or 99% identity with SEQ ID NO: 543. In some specific embodiments, the PhoA-mutated GLP-2-Fc (hIgA) polypeptide comprises SEQ ID NO: 543. In other specific embodiments, the PhoA-mutated GLP-2-Fc (hIgA) polypeptide consists of SEQ ID NO: 543. In some embodiments, the nucleic acid comprises gene sequence encoding a PhoA-mutated GLP-2-Fc (hIgA) polypeptide. In certain embodiments, the PhoA-mutated GLP-2-Fc (hIgA) polypeptide has at least about 80%, 85%, 90%, 95%, or 99% identity with SEQ ID NO: 544. In some embodiments, the PhoA-mutated GLP-2-Fc (hIgA) polypeptide has at least about 85%, 86%, 87%, 88%, 89%, 90%, 91%, 92%, 93%, 94%, 95%, 96%, 97%, 98%, or 99% identity with SEQ ID NO: 544. In some specific embodiments, the PhoA-mutated GLP-2-Fc (hIgA) polypeptide comprises SEQ ID NO: 544. In other specific embodiments, the PhoA-mutated GLP-2-Fc (hIgA) polypeptide consists of SEQ ID NO: 544. In some embodiments, the nucleic acid comprises a gene sequence. In certain embodiments, the nucleic acid comprising the PhoA-mutated GLP-2-Fc (hIgA) gene sequence has at least about 80%, 85%, 90%, 95%, or 99% identity with SEQ ID NO: 551. In some embodiments, the nucleic acid comprising the PhoA-mutated GLP-2-Fc (hIgA) gene sequence has at least about 85%, 86%, 87%, 88%, 89%, 90%, 91%, 92%, 93%, 94%, 95%, 96%, 97%, 98%, or 99% identity with SEQ ID NO: 551. In some specific embodiments, the nucleic acid comprising the PhoA-mutated GLP-2-Fc (hIgA) gene sequence comprises SEQ ID NO: 551. In other specific embodiments the nucleic acid comprising the PhoA-mutated GLP-2-Fc (hIgA) gene sequence consists of SEQ ID NO: 551. In some embodiments, the nucleic acid comprises a gene sequence. In certain embodiments, the nucleic acid comprising the PhoA-mutated GLP-2-Fc (hIgA) gene sequence has at least about 80%, 85%, 90%, 95%, or 99% identity with SEQ ID NO: 552. In some embodiments, the nucleic acid comprising the PhoA-mutated GLP-2-Fc (hIgA) gene sequence has at least about 85%, 86%, 87%, 88%, 89%, 90%, 91%, 92%, 93%, 94%, 95%, 96%, 97%, 98%, or 99% identity with SEQ ID NO: 552. In some specific embodiments, the nucleic acid comprising the PhoA-mutated GLP-2-Fc (hIgA) gene sequence comprises SEQ ID NO: 552. In other specific embodiments the nucleic acid comprising the PhoA-mutated GLP-2-Fc (hIgA) gene sequence consists of SEQ ID NO: 552. In some embodiments, the nucleic acid comprises a gene sequence. In certain embodiments, the nucleic acid comprising the PhoA-mutated GLP-2-Fc (hIgA) gene sequence has at least about 80%, 85%, 90%, 95%, or 99% identity with SEQ ID NO: 553. In some embodiments, the nucleic acid comprising the PhoA-mutated GLP-2-Fc (hIgA) gene sequence has at least about 85%, 86%, 87%, 88%, 89%, 90%, 91%, 92%, 93%, 94%, 95%, 96%, 97%, 98%, or 99% identity with SEQ ID NO: 553. In some specific embodiments, the nucleic acid comprising the PhoA-mutated GLP-2-Fc (hIgA) gene sequence comprises SEQ ID NO: 553. In other specific embodiments the nucleic acid comprising the PhoA-mutated GLP-2-Fc (hIgA) gene sequence consists of SEQ ID NO: 553. In some embodiments, the nucleic acid comprises a gene sequence. In certain embodiments, the nucleic acid comprising the PhoA-mutated GLP-2-Fc (hIgA) gene sequence has at least about 80%, 85%, 90%, 95%, or 99% identity with SEQ ID NO: 554. In some embodiments, the nucleic acid comprising the PhoA-mutated GLP-2-Fc (hIgA) gene sequence has at least about 85%, 86%, 87%, 88%, 89%, 90%, 91%, 92%, 93%, 94%, 95%, 96%, 97%, 98%, or 99% identity with SEQ ID NO: 554. In some specific embodiments, the nucleic acid comprising the PhoA-mutated GLP-2-Fc (hIgA) gene sequence comprises SEQ ID NO: 554. In other specific embodiments the nucleic acid comprising the PhoA-mutated GLP-2-Fc (hIgA) gene sequence consists of SEQ ID NO: 554.

[0403] In some embodiments, the nucleic acid comprises gene sequence encoding a the ECOLIN 19410-mutated GLP-2 polypeptide. In certain embodiments, the ECOLIN 19410-mutated GLP-2 polypeptide has at least about 80%, 85%, 90%, 95%, or 99% identity with SEQ ID NO: 542. In some embodiments, the ECOLIN 19410-mutated GLP-2 polypeptide has at least about 85%, 86%, 87%, 88%, 89%, 90%, 91%, 92%, 93%, 94%, 95%, 96%, 97%, 98%, or 99% identity with SEQ ID NO: 542. In some specific embodiments, the ECOLIN 19410-mutated GLP-2 polypeptide comprises SEQ ID NO: 542. In other specific embodiments, the ECOLIN 19410-mutated GLP-2 polypeptide consists of SEQ ID NO: 542. In some embodiments, the nucleic acid comprises a gene sequence. In certain embodiments, the nucleic acid comprising the ECOLIN 19410-mutated GLP-2 gene sequence has at least about 80%, 85%, 90%, 95%, or 99% identity with SEQ ID NO: 562. In some embodiments, the nucleic acid comprising the ECOLIN 19410-mutated GLP-2 gene sequence has at least about 85%, 86%, 87%, 88%, 89%, 90%, 91%, 92%, 93%, 94%, 95%, 96%, 97%, 98%, or 99% identity with SEQ ID NO: 562. In some specific embodiments, the nucleic acid comprising the ECOLIN 19410-mutated GLP-2 gene sequence comprises SEQ ID NO: 562. In other specific embodiments the nucleic acid comprising the ECOLIN 19410-mutated GLP-2 gene sequence consists of SEQ ID NO: 562.

[0404] In some embodiments, the nucleic acid comprises gene sequence encoding a ECOLIN 19419-mutated GLP-2-Fc (hIgA) polypeptide. In certain embodiments, the ECOLIN 19419-mutated GLP-2-Fc (hIgA) polypeptide has at least about 80%, 85%, 90%, 95%, or 99% identity with SEQ ID NO: 545. In some embodiments, the ECOLIN 19419-mutated GLP-2-Fc (hIgA) polypeptide has at least about 85%, 86%, 87%, 88%, 89%, 90%, 91%, 92%, 93%, 94%, 95%, 96%, 97%, 98%, or 99% identity with SEQ ID NO: 545. In some specific embodiments, the ECOLIN 19419-mutated GLP-2-Fc (hIgA) polypeptide comprises SEQ ID NO: 545. In other specific embodiments, the ECOLIN 19419-mutated GLP-2-Fc (hIgA) polypeptide consists of SEQ ID NO: 545.

[0405] In some embodiments, the nucleic acid comprises gene sequence encoding a ECOLIN 19419-mutated GLP-2-Fc (hIgA) polypeptide. In certain embodiments, the ECOLIN 19419-mutated GLP-2-Fc (hIgA) polypeptide has at least about 80%, 85%, 90%, 95%, or 99% identity with SEQ ID NO: 546. In some embodiments, the ECOLIN 19419-mutated GLP-2-Fc (hIgA) polypeptide has at least about 85%, 86%, 87%, 88%, 89%, 90%, 91%, 92%, 93%, 94%, 95%, 96%, 97%, 98%, or 99% identity with SEQ ID NO: 546. In some specific embodiments, the ECOLIN 19419-mutated GLP-2-Fc (hIgA) polypeptide comprises SEQ ID NO: 546. In other specific embodiments, the ECOLIN 19419-mutated GLP-2-Fc (hIgA) polypeptide consists of SEQ ID NO: 546.

[0406] In some embodiments, the nucleic acid comprises a gene sequence. In certain embodiments, the nucleic acid comprising the ECOLIN 19419-mutated GLP-2-Fc (hIgA) gene sequence has at least about 80%, 85%, 90%, 95%, or 99% identity with SEQ ID NO: 555. In some embodiments, the nucleic acid comprising the ECOLIN 19419-mutated GLP-2-Fc (hIgA) gene sequence has at least about 85%, 86%, 87%, 88%, 89%, 90%, 91%, 92%, 93%, 94%, 95%, 96%, 97%, 98%, or 99% identity with SEQ ID NO: 555. In some specific embodiments, the nucleic acid comprising the ECOLIN 19419-mutated GLP-2-Fc (hIgA) gene sequence comprises SEQ ID NO: 555. In other specific embodiments the nucleic acid comprising the ECOLIN 19419-mutated GLP-2-Fc (hIgA) gene sequence consists of SEQ ID NO: 555.

[0407] In some embodiments, the nucleic acid comprises a gene sequence. In certain embodiments, the nucleic acid comprising the ECOLIN 19419-mutated GLP-2-Fc (hIgA) gene sequence has at least about 80%, 85%, 90%, 95%, or 99% identity with SEQ ID NO: 556. In some embodiments, the nucleic acid comprising the ECOLIN 19419-mutated GLP-2-Fc (hIgA) gene sequence has at least about 85%, 86%, 87%, 88%, 89%, 90%, 91%, 92%, 93%, 94%, 95%, 96%, 97%, 98%, or 99% identity with SEQ ID NO: 556. In some specific embodiments, the nucleic acid comprising the ECOLIN 19419-mutated GLP-2-Fc (hIgA) gene sequence comprises SEQ ID NO: 556. In other specific embodiments the nucleic acid comprising the ECOLIN 19419-mutated GLP-2-Fc (hIgA) gene sequence consists of SEQ ID NO: 556.

[0408] In some embodiments, the nucleic acid comprises a gene sequence. In certain embodiments, the nucleic acid comprising the ECOLIN 19419-mutated GLP-2-Fc (hIgA) gene sequence has at least about 80%, 85%, 90%, 95%, or 99% identity with SEQ ID NO: 557. In some embodiments, the nucleic acid comprising the ECOLIN 19419-mutated GLP-2-Fc (hIgA) gene sequence has at least about 85%, 86%, 87%, 88%, 89%, 90%, 91%, 92%, 93%, 94%, 95%, 96%, 97%, 98%, or 99% identity with SEQ ID NO: 557. In some specific embodiments, the nucleic acid comprising the ECOLIN 19419-mutated GLP-2-Fc (hIgA) gene sequence comprises SEQ ID NO: 557. In other specific embodiments the nucleic acid comprising the ECOLIN 19419-mutated GLP-2-Fc (hIgA) gene sequence consists of SEQ ID NO: 557.

[0409] In some embodiments, the nucleic acid comprises a gene sequence. In certain embodiments, the nucleic acid comprising the ECOLIN 19419-mutated GLP-2-Fc (hIgA) gene sequence has at least about 80%, 85%, 90%, 95%, or 99% identity with SEQ ID NO: 558. In some embodiments, the nucleic acid comprising the ECOLIN 19419-mutated GLP-2-Fc (hIgA) gene sequence has at least about 85%, 86%, 87%, 88%, 89%, 90%, 91%, 92%, 93%, 94%, 95%, 96%, 97%, 98%, or 99% identity with SEQ ID NO: 558. In some specific embodiments, the nucleic acid comprising the ECOLIN 19419-mutated GLP-2-Fc (hIgA) gene sequence comprises SEQ ID NO: 558. In other specific embodiments the nucleic acid comprising the ECOLIN 19419-mutated GLP-2-Fc (hIgA) gene sequence consists of SEQ ID NO: 558.

[0410] In some embodiments, the disclosure provides novel nucleic acids for producing and secreting IL-10. In some embodiments, the nucleic acid encodes one or more IL-10 or IL-10 fusion protein polypeptides. Thus, in some embodiments, the nucleic acid comprises gene sequence(s) encoding one or more IL-10 or IL-10 fusion protein polypeptides. In some embodiments, the one or more IL-10 or IL-10 fusion protein polypeptide(s) is selected from any of SEQ ID NOs: 495-498 and 563-564. In some embodiments, the nucleic acid comprises one or more IL-10 or IL-10 fusion protein cassettes. In some embodiments, the nucleic acid comprises gene sequence comprising one or more IL-10 or IL-10 fusion protein genes selected from SEQ ID NO: 488-494 and 565-566.

[0411] In some embodiments, the nucleic acid comprises gene sequence encoding a IL-10 monomer polypeptide. In certain embodiments, the IL-10 monomer polypeptide has at least about 80%, 85%, 90%, 95%, or 99% identity with SEQ ID NO: 497. In some embodiments, the IL-10 monomer polypeptide has at least about 85%, 86%, 87%, 88%, 89%, 90%, 91%, 92%, 93%, 94%, 95%, 96%, 97%, 98%, or 99% identity with SEQ ID NO: 497. In some specific embodiments, the IL-10 monomer polypeptide comprises SEQ ID NO: 497. In other specific embodiments, the IL-10 monomer polypeptide consists of SEQ ID NO: 497. In some embodiments, the nucleic acid comprises a gene sequence. In certain embodiments, the nucleic acid comprising the IL-10 monomer gene sequence has at least about 80%, 85%, 90%, 95%, or 99% identity with SEQ ID NO: 493. In some embodiments, the nucleic acid comprising the IL-10 monomer gene sequence has at least about 85%, 86%, 87%, 88%, 89%, 90%, 91%, 92%, 93%, 94%, 95%, 96%, 97%, 98%, or 99% identity with SEQ ID NO: 493. In some specific embodiments, the nucleic acid comprising the IL-10 monomer gene sequence comprises SEQ ID NO: 493. In other specific embodiments the nucleic acid comprising the IL-10 monomer gene sequence consists of SEQ ID NO: 493.

[0412] In some embodiments, the nucleic acid comprises gene sequence encoding a IL-10-linker-IL-10 polypeptide. In certain embodiments, the IL-10-linker-IL-10 polypeptide has at least about 80%, 85%, 90%, 95%, or 99% identity with SEQ ID NO: 143. In some embodiments, the IL-10-linker-IL-10 polypeptide has at least about 85%, 86%, 87%, 88%, 89%, 90%, 91%, 92%, 93%, 94%, 95%, 96%, 97%, 98%, or 99% identity with SEQ ID NO: 143. In some specific embodiments, the IL-10-linker-IL-10 polypeptide comprises SEQ ID NO: 143. In other specific embodiments, the IL-10-linker-IL-10 polypeptide consists of SEQ ID NO: 143. In some embodiments, the nucleic acid comprises a gene sequence. In certain embodiments, the nucleic acid comprising the IL-10-linker-IL-10 gene sequence has at least about 80%, 85%, 90%, 95%, or 99% identity with SEQ ID NO: 492. In some embodiments, the nucleic acid comprising the IL-10-linker-IL-10 gene sequence has at least about 85%, 86%, 87%, 88%, 89%, 90%, 91%, 92%, 93%, 94%, 95%, 96%, 97%, 98%, or 99% identity with SEQ ID NO: 492. In some specific embodiments, the nucleic acid comprising the IL-10-linker-IL-10 gene sequence comprises SEQ ID NO: 492. In other specific embodiments the nucleic acid comprising the IL-10-linker-IL-10 gene sequence consists of SEQ ID NO: 492.

[0413] In some embodiments, the nucleic acid comprises gene sequence encoding a Linker polypeptide. In certain embodiments, the Linker polypeptide has at least about 80%, 85%, 90%, 95%, or 99% identity with SEQ ID NO: 498. In some embodiments, the Linker polypeptide has at least about 85%, 86%, 87%, 88%, 89%, 90%, 91%, 92%, 93%, 94%, 95%, 96%, 97%, 98%, or 99% identity with SEQ ID NO: 498. In some specific embodiments, the Linker polypeptide comprises SEQ ID NO: 498. In other specific embodiments, the Linker polypeptide consists of SEQ ID NO: 498. In some embodiments, the nucleic acid comprises a gene sequence. In certain embodiments, the nucleic acid comprising the Linker gene sequence has at least about 80%, 85%, 90%, 95%, or 99% identity with SEQ ID NO: 494. In some embodiments, the nucleic acid comprising the Linker gene sequence has at least about 85%, 86%, 87%, 88%, 89%, 90%, 91%, 92%, 93%, 94%, 95%, 96%, 97%, 98%, or 99% identity with SEQ ID NO: 494. In some specific embodiments, the nucleic acid comprising the Linker gene sequence comprises SEQ ID NO: 494. In other specific embodiments the nucleic acid comprising the Linker gene sequence consists of SEQ ID NO: 494.

[0414] In some embodiments, the nucleic acid comprises gene sequence encoding a PhoA-IL-10 polypeptide. In certain embodiments, the PhoA-IL-10 polypeptide has at least about 80%, 85%, 90%, 95%, or 99% identity with SEQ ID NO: 563. In some embodiments, the PhoA-IL-10 polypeptide has at least about 85%, 86%, 87%, 88%, 89%, 90%, 91%, 92%, 93%, 94%, 95%, 96%, 97%, 98%, or 99% identity with SEQ ID NO: 563. In some specific embodiments, the PhoA-IL-10 polypeptide comprises SEQ ID NO: 563. In other specific embodiments, the PhoA-IL-10 polypeptide consists of SEQ ID NO: 563. In some embodiments, the nucleic acid comprises a gene sequence. In certain embodiments, the nucleic acid comprising the PhoA-IL-10 gene sequence has at least about 80%, 85%, 90%, 95%, or 99% identity with SEQ ID NO: 566. In some embodiments, the nucleic acid comprising the PhoA-IL-10 gene sequence has at least about 85%, 86%, 87%, 88%, 89%, 90%, 91%, 92%, 93%, 94%, 95%, 96%, 97%, 98%, or 99% identity with SEQ ID NO: 566. In some specific embodiments, the nucleic acid comprising the PhoA-IL-10 gene sequence comprises SEQ ID NO: 566. In other specific embodiments the nucleic acid comprising the PhoA-IL-10 gene sequence consists of SEQ ID NO: 566.

[0415] In some embodiments, the nucleic acid comprises gene sequence encoding a PhoA-IL-10-linker-IL-10 polypeptide. In certain embodiments, the PhoA-IL-10-linker-IL-10 polypeptide has at least about 80%, 85%, 90%, 95%, or 99% identity with SEQ ID NO: 496. In some embodiments, the PhoA-IL-10-linker-IL-10 polypeptide has at least about 85%, 86%, 87%, 88%, 89%, 90%, 91%, 92%, 93%, 94%, 95%, 96%, 97%, 98%, or 99% identity with SEQ ID NO: 496. In some specific embodiments, the PhoA-IL-10-linker-IL-10 polypeptide comprises SEQ ID NO: 496. In other specific embodiments, the PhoA-IL-10-linker-IL-10 polypeptide consists of SEQ ID NO: 496. In some embodiments, the nucleic acid comprises a gene sequence. In certain embodiments, the nucleic acid comprising the PhoA-IL-10-linker-IL-10 gene sequence has at least about 80%, 85%, 90%, 95%, or 99% identity with SEQ ID NO: 489. In some embodiments, the nucleic acid comprising the PhoA-IL-10-linker-IL-10 gene sequence has at least about 85%, 86%, 87%, 88%, 89%, 90%, 91%, 92%, 93%, 94%, 95%, 96%, 97%, 98%, or 99% identity with SEQ ID NO: 489. In some specific embodiments, the nucleic acid comprising the PhoA-IL-10-linker-IL-10 gene sequence comprises SEQ ID NO: 489. In other specific embodiments the nucleic acid comprising the PhoA-IL-10-linker-IL-10 gene sequence consists of SEQ ID NO: 489.

[0416] In some embodiments, the nucleic acid comprises gene sequence encoding a ECOLIN 19410-IL-10 polypeptide. In certain embodiments, the ECOLIN 19410-IL-10 polypeptide has at least about 80%, 85%, 90%, 95%, or 99% identity with SEQ ID NO: 564. In some embodiments, the ECOLIN 19410-IL-10 polypeptide has at least about 85%, 86%, 87%, 88%, 89%, 90%, 91%, 92%, 93%, 94%, 95%, 96%, 97%, 98%, or 99% identity with SEQ ID NO: 564. In some specific embodiments, the ECOLIN 19410-IL-10 polypeptide comprises SEQ ID NO: 564. In other specific embodiments, the ECOLIN 19410-IL-10 polypeptide consists of SEQ ID NO: 564. In some embodiments, the nucleic acid comprises a gene sequence. In certain embodiments, the nucleic acid comprising the ECOLIN 19410-IL-10 gene sequence has at least about 80%, 85%, 90%, 95%, or 99% identity with SEQ ID NO: 566. In some embodiments, the nucleic acid comprising the ECOLIN 19410-IL-10 gene sequence has at least about 85%, 86%, 87%, 88%, 89%, 90%, 91%, 92%, 93%, 94%, 95%, 96%, 97%, 98%, or 99% identity with SEQ ID NO: 566. In some specific embodiments, the nucleic acid comprising the ECOLIN 19410-IL-10 gene sequence comprises SEQ ID NO: 566. In other specific embodiments the nucleic acid comprising the ECOLIN 19410-IL-10 gene sequence consists of SEQ ID NO: 566.

[0417] In some embodiments, the nucleic acid comprises gene sequence encoding a ECOLIN 19410-IL-10-linker-IL-10 polypeptide. In certain embodiments, the ECOLIN 19410-IL-10-linker-IL-10 polypeptide has at least about 80%, 85%, 90%, 95%, or 99% identity with SEQ ID NO: 495. In some embodiments, the ECOLIN 19410-IL-10-linker-IL-10 polypeptide has at least about 85%, 86%, 87%, 88%, 89%, 90%, 91%, 92%, 93%, 94%, 95%, 96%, 97%, 98%, or 99% identity with SEQ ID NO: 495. In some specific embodiments, the ECOLIN 19410-IL-10-linker-IL-10 polypeptide comprises SEQ ID NO: 495. In other specific embodiments, the ECOLIN 19410-IL-10-linker-IL-10 polypeptide consists of SEQ ID NO: 495. In some embodiments, the nucleic acid comprises a gene sequence. In certain embodiments, the nucleic acid comprising the ECOLIN 19410-IL-10-linker-IL-10 gene sequence has at least about 80%, 85%, 90%, 95%, or 99% identity with SEQ ID NO: 488. In some embodiments, the nucleic acid comprising the ECOLIN 19410-IL-10-linker-IL-10 gene sequence has at least about 85%, 86%, 87%, 88%, 89%, 90%, 91%, 92%, 93%, 94%, 95%, 96%, 97%, 98%, or 99% identity with SEQ ID NO: 488. In some specific embodiments, the nucleic acid comprising the ECOLIN 19410-IL-10-linker-IL-10 gene sequence comprises SEQ ID NO: 488. In other specific embodiments, the nucleic acid comprising the ECOLIN 19410-IL-10-linker-IL-10 gene sequence consists of SEQ ID NO: 488.

[0418] In any of the above embodiments, the nucleic acid may further comprise one or more of the following sequences: (1) promoter, (2) enhancer, (3) regulatory sequence, (4) ribosome binding site—nonlimiting examples of RBS are provided herein and include SEQ ID NO: 336-384, (5) secretion tag, non-limiting examples of secretion tags are provided herein and include SEQ ID NO: 385-394 (6) leader sequence, (7) auxotrophy, (8) antibiotic resistance.

[0419] In any of these embodiments, the nucleic acid may be functionally replaced, modified, and/or mutated in order to enhance stability and/or increase polypeptide production or secretion. In some embodiments, the nucleic acid is expressed and secreted in low-oxygen conditions, in the presence of certain molecules or metabolites, in the presence of molecules or metabolites associated with inflammation or an inflammatory response, or in the presence of some other metabolite that may or may not be present in the gut, such as arabinose. Exemplary chemical inducers are described herein. In some embodiments, the nucleic acid is directly operably linked to a first promoter. In some embodiments, the nucleic acid is indirectly operably linked to a first promoter. In one embodiment, the promoter is not operably linked with the nucleic acid in nature.

[0420] In some embodiments, nucleic acid is expressed under the control of a constitutive promoter. Non-limiting examples constitutive promoters are provided herein and include SEQ ID NO: 189-335.

[0421] In another embodiment, the nucleic acid is expressed under the control of an inducible promoter. In some embodiments, the nucleic acid is expressed under the control of a promoter that is directly or indirectly induced by exogenous environmental conditions. In one embodiment, the nucleic acid is expressed under the control of a promoter that is directly or indirectly induced by low-oxygen or anaerobic conditions, wherein expression of the nucleic acid is activated under low-oxygen or anaerobic environments, such as the environment of the mammalian gut. Inducible promoters are described in more detail infra. Non-limiting examples of low oxygen inducible promoters are provided herein and include SEQ ID NO: 151-167. Non-limiting examples of OxyR inducible promoters are provided herein and include SEQ ID NO: 168-171. Non-limiting examples of promoters regulated by chemical inducers are provided herein and include SEQ ID NO: 173-188.

[0422] The nucleic acid may be present on a plasmid or chromosome in the bacterial cell. In one embodiment, the nucleic acid is located on a plasmid in the bacterial cell. In another embodiment, the nucleic acid is located in the chromosome of the bacterial cell. In yet another embodiment, a native copy of the nucleic acid is located in the chromosome of the bacterial cell.

### Multiple Mechanisms of Action

[0423] In some embodiments, the bacteria are genetically engineered to include multiple mechanisms of action (MOAs), e.g., circuits producing multiple copies of the same product (e.g., to enhance copy number) or circuits performing multiple different functions. Examples of insertion sites include, but are not limited to, malE/K, insB/I, araC/BAD, lacZ, dapA, cea, and other shown in FIG. 5. For example, the recombinant bacteria may include four copies of GLP-2 inserted at four different insertion sites, e.g., malE/K, insB/I, araC/BAD, and lacZ. Alternatively, the recombinant bacteria may include three copies of GLP-2 inserted at three different insertion sites, e.g., malE/K, insB/I, and lacZ, and three copies of a butyrogenic gene cassette inserted at three different insertion sites, e.g., dapA, cea, and araC/BA

[0424] In some embodiments, the bacteria are genetically engineered to include multiple mechanisms of action (MOAs), e.g., circuits producing multiple copies of the same product (e.g., to enhance copy number) or circuits performing multiple different functions. For example, the recombinant bacteria may include four copies of the gene, gene(s), or gene cassettes for producing the payload(s) inserted at four different insertion sites. Alternatively, the recombinant bacteria may include three copies of the gene, gene(s), or gene cassettes for producing the payload(s) inserted at three different insertion sites and three copies of the gene, gene(s), or gene cassettes for producing the payload(s) inserted at three different insertion sites.

[0425] In some embodiments, the recombinant bacteria comprise one or more of (1) one or more gene(s) or gene cassette(s) for the production of propionate as described herein, (2) one or more gene(s) or gene cassette(s) for the production of butyrate as described herein, (3) one or more gene(s) or gene cassette(s) for the production of acetate as described herein, (4) one or more gene(s) or gene cassette(s) for the production of tryptophan and/or its metabolites (including but not limited to kynurenine, indole, indole-3-acetic acid, indole-3 aldehyde, and IPA) as described herein, (5) one or more gene(s) or gene cassette(s) for the production of one or more of GLP-2 and GLP-2 analogs as described herein, (6) one or more gene(s) or gene cassette(s) for the production of human or viral or monommerized IL-10 as described herein, (7) one or more gene(s) or gene cassette(s) for the production of human IL-22 as described herein, (8) one or more gene(s) or gene cassette(s) for the production of IL-2, and/or SOD, and/or IL-27 and other interleukins as described herein, (9) one or more gene(s) or gene cassette(s) for the production of one or more transporters, e.g. for the import of tryptophan and/or metabolites as described herein, (10) one or more polypeptides for secretion, including but not limited to GLP-2 and its analogs, IL-10, and/or IL-22, SCFA and/or tryptophan synthesis and/or catabolic enzymes in wild type or in mutated form (for increased stability or metabolic activity), (11) one or more components of secretion machinery as described herein, (12) one or more auxotrophies, e.g., deltaThyA (13) one more antibiotic resistances, including but not limited to, kanamycin or chloramphenicol resistance, (14) one or more mutations/deletions to increase the flux through a metabolic pathway encoded by one or more genes or gene cassette(s), e.g mutations/deletions in genes in NADH consuming pathways, genes involved in feedback inhibition of a metabolic pathway encoded by the gene(s) or gene cassette(s) genes as described herein, (15) one or more mutations/deletions in one or more genes of the endogenous metabolic pathways, e.g., tryptophan synthesis pathway.

[0426] In some embodiments, the recombinant bacteria promote one or more of the following effector functions: (1) neutralizes TNF-α, IFN-γ, IL-1β, IL-6, IL-8, IL-17, and/or chemokines, e.g., CXCL-8 and CCL2 (2) activates include AHR (e.g., which result in IL-22 production) and (3) activates PXR, (4) inhibits HDACs, (5) activates GPR41 and/or GPR43 and/or GPR109A, (6) inhibits NF-kappaB signaling, (7) modulators of PPARgamma, (8) activates of AMPK signaling, (9) modulates GLP-1 secretion and/or (10). scavenges hydroxyl radicals and functions as antioxidants.

[0427] In some embodiments, under conditions where the gene, gene(s), or gene cassettes for producing the payload(s) is expressed, the recombinant bacteria of the disclosure produce at least about 1.5-fold, at least about 2-fold, at least about 10-fold, at least about 15-fold, at least about 20-fold, at least about 30-fold, at least about 50-fold, at least about 100-fold, at least about 200-fold, at least about 300-fold, at least about 400-fold, at least about 500-fold, at least about 600-fold, at least about 700-fold, at least about 800-fold, at least about 900-fold, at least about 1,000-fold, or at least about 1,500-fold more of the payload(s) as compared to unmodified bacteria of the same subtype under the same conditions.

[0428] In some embodiments, the recombinant bacteria produce at least about 1.5-fold, at least about 2-fold, at least about 10-fold, at least about 15-fold, at least about 20-fold, at least about 30-fold, at least about 50-fold, at least about 100-fold, at least about 200-fold, at least about 300-fold, at least about 400-fold, at least about 500-fold, at least about 600-fold, at least about 700-fold, at least about 800-fold, at least about 900-fold, at least about 1,000-fold, or at least about 1,500-fold more of a payload under inducing conditions than unmodified bacteria of the same subtype under the same conditions. Certain unmodified bacteria will not have detectable levels of the payload. In embodiments using genetically modified forms of these bacteria, the payload will be detectable under inducing conditions.

[0429] In some embodiments, quantitative PCR (qPCR) is used to amplify, detect, and/or quantify mRNA expression levels of the gene, gene(s), or gene cassettes for producing the payload(s). Primers may be designed and used to detect mRNA in a sample according to methods known in the art. In some embodiments, a fluorophore is added to a sample reaction mixture that may contain payload RNA, and a thermal cycler is used to illuminate the sample reaction mixture with a specific wavelength of light and detect the subsequent emission by the fluorophore. The reaction mixture is heated and cooled to predetermined temperatures for predetermined time periods. In certain embodiments, the heating and cooling is repeated for a predetermined number of cycles. In some embodiments, the reaction mixture is heated and cooled to 90-100° C., 60-70° C., and 30-50° C. for a predetermined number of cycles. In a certain embodiment, the reaction mixture is heated and cooled to 93-97° C., 55-65° C., and 35-45° C. for a predetermined number of cycles. In some embodiments, the accumulating amplicon is quantified after each cycle of the qPCR. The number of cycles at which fluorescence exceeds the threshold is the threshold cycle (CT). At least one CT result for each sample is generated, and the CT result(s) may be used to determine mRNA expression levels of the payload(s).

[0430] In some embodiments, the recombinant bacteria comprise gene sequence(s) encoding one or more therapeutic peptides for secretion, e.g., IL-10, IL-2, IL-22, IL-27, SOD, GLP-2 and kynurenine, as described herein.

[0431] In some embodiments, the recombinant bacteria comprise a butyrate gene cassette and are capable of producing butyrate and comprise a gene sequence encoding IL-10. In some embodiments, the recombinant bacteria comprise a butyrate gene cassette and are capable of producing butyrate and comprise a gene sequence encoding IL-2. In some embodiments, the recombinant bacteria comprise a butyrate gene cassette and are capable of producing butyrate and comprise a gene sequence encoding IL-22. In some embodiments, the recombinant bacteria comprise a butyrate gene cassette and are capable of producing butyrate and comprise a gene sequence encoding IL-27. In some embodiments, the recombinant bacteria comprise a butyrate gene cassette and are capable of producing butyrate and comprise a gene sequence encoding SOD. In some embodiments, the recombinant bacteria comprise a butyrate gene cassette and are capable of producing butyrate and comprise a gene sequence encoding GLP-2. In some embodiments, the recombinant bacteria comprise a butyrate gene cassette and are capable of producing butyrate and are capable of producing kyurenine.

[0432] In some embodiments, the recombinant bacteria comprise a butyrate gene cassette and are capable of producing butyrate and comprise a gene sequence encoding IL-10 and one or more gene sequences encoding IL-2, IL-22, IL-27, GLP-2, and SOD.

[0433] In some embodiments, the recombinant bacteria comprise a butyrate gene cassette and are capable of producing butyrate and comprise a gene sequence encoding IL-2 and one or more gene sequences encoding IL-10, IL-22, IL-27, GLP-2, and SOD.

[0434] In any of these embodiments, the bacteria can produce kynurenine. In some embodiments, the recombinant bacteria comprise a butyrate gene cassette and are capable of producing butyrate and comprise a gene sequence encoding IL-22 and one or more gene sequences encoding IL-2, IL-10, IL-27, GLP-2, and SOD.

[0435] In some embodiments, the recombinant bacteria comprise a butyrate gene cassette and are capable of producing butyrate and comprise a gene sequence encoding SOD and one or more gene sequences encoding IL-2, IL-22, IL-27, GLP-2, and IL-10.

[0436] In some embodiments, the recombinant bacteria comprise a gene sequence(s) encoding IL-27 and a gene sequence encoding one or more molecules selected from IL-2, IL-22, IL-10, GLP-2, and SOD.

[0437] In some embodiments, the recombinant bacteria comprise a gene sequence encoding GLP-2 and a gene sequence(s) encoding one or more molecules selected from IL-2, IL-22, IL-27, IL-10, and SOD.

[0438] In any of these embodiments the bacteria comprise a propionate gene cassette and can produce propionate. In any of these embodiments, the recombinant bacteria can produce kynurenine. In any of these embodiments, the genetically engineered bacteria are capable of producing butyrate. In any of these embodiments, the recombinant bacteria are capable of producing acetate.

[0439] In any of these combination embodiments, the GLP-2 polypeptide may be a GLP-2 fusion protein. In some embodiments, the GLP-2 fusion protein is a GLP-2-IgA fusion protein as described herein. In any of these combination embodiments, the IL-10 polypeptide may be a fusion protein. In some embodiments, the IL-10 fusion protein is a IL-10-Linker-IL-10 fusion protein as described herein.

[0440] In any of these combination embodiments, the recombinant bacteria may comprise gene sequence(s) which encode two separate effector polypeptides covalently linked together through a peptide bond or peptide linker. In one embodiment, the recombinant bacteria may comprise gene sequence(s) which encode GLP-2 covalently linked to IL-22. In one embodiment, the recombinant bacteria may comprise gene sequence(s) which encode GLP-2 joined by a peptide bond or a peptide linker to a first and a second IL-10 monomer, which are joined together by a second peptide bond or peptide linker.

[0441] The gene sequence(s) encoding therapeutic peptides for secretion may be expressed under the control of a constitutive promoter or an inducible promoter. The gene sequence(s) encoding the one or more therapeutic peptides for secretion are expressed under the control of a promoter that is directly or indirectly induced by exogenous environmental conditions, e.g., low-oxygen or anaerobic conditions, wherein expression of the gene sequence(s) encoding the one or more therapeutic peptides for secretion are activated under low-oxygen or anaerobic environments, such as the environment of the mammalian gut. Alternatively, the gene sequence(s) encoding the one or more therapeutic peptides for secretion are expressed under the control of a promoter that is directly or indirectly induced by inflammatory conditions. Exemplary inducible promoters described herein include oxygen level-dependent promoters (e.g., FNR-inducible promoter), promoters induced by inflammation or an inflammatory response (RNS, ROS promoters), and promoters induced by a metabolite that may or may not be naturally present (e.g., can be exogenously added) in the gut, e.g., arabinose and tetracycline. Examples of inducible promoters include, but are not limited to, an FNR responsive promoter, a P_{araC} promoter, a P_{araBAD} promoter, and a P_{TetR} promoter, each of which are described in more detail herein. Inducible promoters are described in more detail infra.

[0442] The at least one gene encoding the therapeutic peptides for secretion may be present on a plasmid or chromosome in the bacterial cell. In one embodiment, a native copy of the gene sequence(s) encoding the therapeutic peptides for secretion are located in the chromosome of the bacterial cell, and at least one gene encoding the therapeutic peptides for secretion from a different species of bacteria are located on a plasmid in the bacterial cell. In yet another embodiment, a native copy of the gene sequence(s) encoding the therapeutic peptides for secretion are located on a plasmid in the bacterial cell, and at least one gene encoding the therapeutic peptides for secretion from a different species of bacteria are located on a plasmid in the bacterial cell. In yet another embodiment, a native copy of the gene sequence(s) encoding the therapeutic peptides for secretion are located in the chromosome of the bacterial cell, and at least one gene encoding the therapeutic peptides for secretion from a different species of bacteria are located in the chromosome of the bacterial cell.

[0443] In some embodiments, the gene sequence(s) encoding the one or more therapeutic peptides for secretion are expressed on a low-copy plasmid. In some embodiments, the gene sequence(s) encoding the one or more therapeutic peptides for secretion are expressed on a high-copy plasmid. In some embodiments, the high-copy plasmid may be useful for increasing expression of the therapeutic peptides for secretion.

[0444] In some embodiments, a recombinant bacterial cell comprising at least one gene encoding the therapeutic peptides for secretion are expressed on a high-copy plasmid do not increase tryptophan catabolism as compared to a recombinant bacterial cell comprising the same gene expressed on a low-copy plasmid in the absence of a heterologous importer of tryptophan and/or its metabolites and additional copies of a native importer of tryptophan and/or its metabolites. In alternate embodiments, the importer of tryptophan and/or its metabolites is used in conjunction with a high-copy plasmid.

[0445] In some embodiments, the recombinant bacteria described above further comprise one or more of the modifications, mutations, and/or deletions in endogenous genes described herein.

[0446] In some embodiments, the genetically engineered microorganism further comprises a mutation and/or deletion in ldhA. In some embodiments, the genetically engineered microorganism further comprises a mutation and/or deletion in frdA. In some embodiments, the genetically engineered microorganism further comprises a mutation and/or deletion in adhE. In some embodiments, the genetically engineered microorganism further comprises a mutation and/or deletion in one or more of ldhA, frdA, and adhE.

[0447] In some embodiments, surface display could be used to display a protein of interest on the surface of the genetically modified bacterium. In some embodiments, the recombinant bacteria and/or microorganisms encode one or more gene(s) and/or gene cassette(s) encoding a protein of interest, e.g., an effector molecule, which is anchored or displayed on the surface of the bacteria and/or microorganisms.

### Induction of Payloads During Strain Culture

[0448] In some embodiments, it is desirable to pre-induce payload or protein of interest expression and/or payload activity prior to administration. Such payload or protein of interest may be an effector intended for secretion or may be an enzyme which catalyzes a metabolic reaction to produce an effector. In other embodiments, the protein of interest is an enzyme which catabolizes a harmful metabolite. In such situations, the strains are pre-loaded with active payload or protein of interest. In such instances, the recombinant bacteria express one or more protein(s) of interest, under conditions provided in bacterial culture during cell growth, expansion, purification, fermentation, and/or manufacture prior to administration in vivo. Such culture conditions can be provided in a flask, fermenter or other appropriate culture vessel, e.g., used during cell growth, cell expansion, fermentation, recovery, purification, formulation, and/or manufacture. As used herein, the term “bacterial culture” or bacterial cell culture” or “culture” refers to bacterial cells or microorganisms, which are maintained or grown in vitro during several production processes, including cell growth, cell expansion, recovery, purification, fermentation, and/or manufacture. As used herein, the term “fermentation” refers to the growth, expansion, and maintenance of bacteria under defined conditions. Fermentation may occur under a number of cell culture conditions, including anaerobic or low oxygen or oxygenated conditions, in the presence of inducers, nutrients, at defined temperatures, and the like.

[0449] Culture conditions are selected to achieve optimal activity and viability of the cells, while maintaining a high cell density (high biomass) yield. A number of cell culture conditions and operating parameters are monitored and adjusted to achieve optimal activity, high yield and high viability, including oxygen levels (e.g., low oxygen, microaerobic, aerobic), temperature of the medium, and nutrients and/or different growth media, chemical and/or nutritional inducers and other components provided in the medium.

[0450] In some embodiments, the one or more protein(s) of interest and are directly or indirectly induced, while the strains is grown up for in vivo administration. Without wishing to be bound by theory, pre-induction may boost in vivo activity. This is particularly important in proximal regions of the gut which are reached first by the bacteria, e.g., the small intestine. If the bacterial residence time in this compartment is relatively short, the bacteria may pass through the small intestine without reaching full in vivo induction capacity. In contrast, if a strain is pre-induced and preloaded, the strains are already fully active, allowing for greater activity more quickly as the bacteria reach the intestine. Ergo, no transit time is “wasted”, in which the strain is not optimally active. As the bacteria continue to move through the intestine, in vivo induction occurs under environmental conditions of the gut (e.g., low oxygen, or in the presence of gut metabolites).

[0451] In one embodiment, expression of one or more payload(s), is induced during cell growth, cell expansion, fermentation, recovery, purification, formulation, and/or manufacture. In one embodiment, expression of several different proteins of interest is induced during cell growth, cell expansion, fermentation, recovery, purification, formulation, and/or manufacture. In one embodiment, expression of one or more payload(s), is driven from the same promoter as a multicistronic message. In one embodiment, expression of one or more payload(s) is driven from the same promoter as two or more separate messages. In one embodiment, expression of one or more payload(s) is driven from the one or more different promoters.

[0452] In some embodiments, the strains are administered without any pre-induction protocols during strain growth prior to in vivo administration.

[0453] Anaerobic Induction

[0454] In some embodiments, cells are induced under anaerobic or low oxygen conditions in culture. In such instances, cells are grown (e.g., for 1.5 to 3 hours) until they have reached a certain OD, e.g., ODs within the range of 0.1 to 10, indicating a certain density e.g., ranging from 1×10\hat{ }8 to 1×10\hat{ }11, and exponential growth and are then switched to anaerobic or low oxygen conditions for approximately 3 to 5 hours. In some embodiments, strains are induced under anaerobic or low oxygen conditions, e.g. to induce FNR promoter activity and drive expression of one or more payload(s) under the control of one or more FNR promoters.

[0455] In one embodiment, expression of one or more payload(s), is under the control of one or more anaerobic or low oxygen inducible promoter(s), e.g., FNR promoter(s), and is induced during cell growth, cell expansion, fermentation, recovery, purification, formulation, and/or manufacture under anaerobic or low oxygen conditions. In one embodiment, expression of several different proteins of interest is under the control of one or more anaerobic or low oxygen inducible promoter(s), e.g., FNR promoter(s) and is induced during cell growth, cell expansion, fermentation, recovery, purification, formulation, and/or manufacture under anaerobic or low oxygen conditions.

[0456] In one embodiment, expression of two or more payload(s), is under the control of one or more anaerobic or low oxygen inducible promoter(s), e.g., FNR promoter(s), and is driven from the same promoter in the form of a multicistronic message under anaerobic or low oxygen conditions. In one embodiment, expression of one or more payload(s), is under the control of one or more anaerobic or low oxygen inducible promoter(s), e.g., FNR promoter(s), and is driven from the same promoter as two or more separate messages under anaerobic or low oxygen conditions. In one embodiment, expression of one or more payload(s) under the control of one or more anaerobic or low oxygen inducible promoter(s), e.g., FNR promoter(s), and is driven from the one or more different promoters under anaerobic or low oxygen conditions.

[0457] Without wishing to be bound by theory, strains that comprise one or more payload(s) under the control of an FNR promoter, may allow expression of payload(s) from these promoters in vitro, under anaerobic or low oxygen culture conditions, and in vivo, under the low oxygen conditions found in the gut.

[0458] In some embodiments, promoters inducible by arabinose, IPTG, rhamnose, tetracycline, and/or other chemical and/or nutritional inducers can be induced under anaerobic or low oxygen conditions in the presence of the chemical and/or nutritional inducer. In some embodiments, strains may comprise a combination of gene sequence(s), some of which are under control of FNR promoters and others which are under control of promoters induced by chemical and/or nutritional inducers. In some embodiments, strains may comprise one or more payload gene sequence(s) under the control of one or more FNR promoter(s) and one or more payload gene sequence(s) which are induced by a one or more chemical and/or nutritional inducer(s), including, but not limited to, arabinose, IPTG, rhamnose, tetracycline, and/or other chemical and/or nutritional inducers described herein or known in the art. In some embodiments, strains may comprise one or more payload gene sequence(s) and/or under the control of one or more FNR promoter(s), and one or more payload gene sequence(s) under the control of a one or more constitutive promoter(s) described herein. In some embodiments, strains may comprise one or more payload gene sequence(s) under the control of an FNR promoter and one or more payload gene sequence(s) under the control of a one or more thermoregulated promoter(s) described herein.

[0459] In one embodiment, expression of one or more payload gene sequence(s) is under the control of one or more promoter(s) regulated by chemical and/or nutritional inducers and is induced during cell growth, cell expansion, fermentation, recovery, purification, formulation, and/or manufacture under anaerobic and/or low oxygen conditions. In one embodiment, the chemical and/or nutritional inducer is arabinose and the promoter is inducible by arabinose. In one embodiment, the chemical and/or nutritional inducer is IPTG and the promoter is inducible by IPTG. In one embodiment, the chemical and/or nutritional inducer is rhamnose and the promoter is inducible by rhamnose. In one embodiment, the chemical and/or nutritional inducer is tetracycline and the promoter is inducible by tetracycline.

[0460] In one embodiment, expression of one or more payload(s), is under the control of one or more promoter(s) regulated by chemical and/or nutritional inducers and is driven from the same promoter in the form of a multicistronic message under anaerobic and/or low oxygen conditions. In one embodiment, expression of one or more payload(s), is under the control of one or more promoter(s) regulated by chemical and/or nutritional inducers and is driven from the same promoter as two or more separate messages under anaerobic and/or low oxygen conditions. In one embodiment, expression of one or more payload(s), is under the control of one or more promoter(s) regulated by chemical and/or nutritional inducers and is driven from the one or more different promoters under anaerobic and/or low oxygen conditions.

[0461] In one embodiment, strains may comprise a combination of gene sequence(s), some of which are under control of a first inducible promoter and others which are under control of a second inducible promoter, both induced by chemical and/or nutritional inducers, under anaerobic or low oxygen conditions. In one embodiment, strains may comprise a combination of gene sequence(s), some of which are under control of a first inducible promoter and others which are under control of a second inducible promoter, both induced by chemical and/or nutritional inducers. In some embodiments, the strains comprise gene sequence(s) under the control of a third inducible promoter, e.g., an anaerobic/low oxygen promoter, e.g., FNR promoter. In one embodiment, strains may comprise a combination of gene sequence(s), some of which are under control of a first inducible promoter, e.g., a chemically induced promoter or a low oxygen promoter and others which are under control of a second inducible promoter, e.g. a temperature sensitive promoter. In one embodiment, strains may comprise a combination of gene sequence(s), some of which are under control of a first inducible promoter, e.g., a FNR promoter and others which are under control of a second inducible promoter, e.g. a temperature sensitive promoter. In one embodiment, strains may comprise a combination of gene sequence(s), some of which are under control of a first inducible promoter, e.g., a chemically induced and others which are under control of a second inducible promoter, e.g. a temperature sensitive promoter. In some embodiments, strains may comprise one or more payload gene sequence(s) under the control of an FNR promoter and one or more payload gene sequence(s) under the control of a one or more promoter(s) which are induced by a one or more chemical and/or nutritional inducer(s), including, but not limited to, by arabinose, IPTG, rhamnose, tetracycline, and/or other chemical and/or nutritional inducers described herein or known in the art. Additionally the strains may comprise a construct which is under thermoregulatory control. In some embodiments, the bacteria strains further comprise payload sequence(s) under the control of one or more constitutive promoter(s) active under low oxygen conditions.

[0462] Aerobic Induction

[0463] In some embodiments, it is desirable to prepare, pre-load and pre-induce the strains under aerobic conditions. This allows more efficient growth and viability, and, in some cases, reduces the build-up of toxic metabolites. In such instances, cells are grown (e.g., for 1.5 to 3 hours) until they have reached a certain OD, e.g., ODs within the range of 0.1 to 10, indicating a certain density e.g., ranging from 1×10\hat{ }8 to 1×10\hat{ }11, and exponential growth and are then induced through the addition of the inducer or through other means, such as shift to a permissive temperature, for approximately 3 to 5 hours.

[0464] In some embodiments, promoters inducible by arabinose, IPTG, rhamnose, tetracycline, and/or other chemical and/or nutritional inducers described herein or known in the art can be induced under aerobic conditions in the presence of the chemical and/or nutritional inducer during cell growth, cell expansion, fermentation, recovery, purification, formulation, and/or manufacture. In one embodiment, expression of one or more payload(s) is under the control of one or more promoter(s) regulated by chemical and/or nutritional inducers and is induced during cell growth, cell expansion, fermentation, recovery, purification, formulation, and/or manufacture under aerobic conditions.

[0465] In one embodiment, expression of one or more payload(s), is under the control of one or more promoter(s) regulated by chemical and/or nutritional inducers and is driven from the same promoter in the form of a multicistronic message under aerobic conditions. In one embodiment, expression of one or more payload(s), is under the control of one or more promoter(s) regulated by chemical and/or nutritional inducers and is driven from the same promoter as two or more separate messages under aerobic conditions. In one embodiment, expression of one or more payload(s), is under the control of one or more promoter(s) regulated by chemical and/or nutritional inducers and is driven from the one or more different promoters under aerobic conditions.

[0466] In one embodiment, the chemical and/or nutritional inducer is arabinose and the promoter is inducible by arabinose. In one embodiment, the chemical and/or nutritional inducer is IPTG and the promoter is inducible by IPTG. In one embodiment, the chemical and/or nutritional inducer is rhamnose and the promoter is inducible by rhamnose. In one embodiment, the chemical and/or nutritional inducer is tetracycline and the promoter is inducible by tetracycline.

[0467] In some embodiments, promoters regulated by temperature are induced during cell growth, cell expansion, fermentation, recovery, purification, formulation, and/or manufacture. In one embodiment, expression of one or more payload(s) is driven directly or indirectly by one or more thermoregulated promoter(s) and is induced during cell growth, cell expansion, fermentation, recovery, purification, formulation, and/or manufacture under aerobic conditions.

[0468] In one embodiment, expression of one or more payload(s) is driven directly or indirectly by one or more thermoregulated promoter(s) and is driven from the same promoter in the form of a multicistronic message under aerobic conditions. In one embodiment, expression of one or more payload(s) is driven directly or indirectly by one or more thermoregulated promoter(s) and is driven from the same promoter as two or more separate messages under aerobic conditions. In one embodiment, expression of one or more payload(s) is driven directly or indirectly by one or more thermoregulated promoter(s) and is driven from the one or more different promoters under aerobic conditions.

[0469] In one embodiment, strains may comprise a combination of gene sequence(s), some of which are under control of a first inducible promoter and others which are under control of a second inducible promoter, both induced under aerobic conditions. In some embodiments, a strain comprises three or more different promoters which are induced under aerobic culture conditions.

[0470] In one embodiment, strains may comprise a combination of gene sequence(s), some of which are under control of a first inducible promoter and others which are under control of a second inducible promoter, both induced by chemical and/or nutritional inducers. In one embodiment, strains may comprise a combination of gene sequence(s), some of which are under control of a first inducible promoter, e.g. a chemically inducible promoter, and others which are under control of a second inducible promoter, e.g. a temperature sensitive promoter under aerobic culture conditions. In some embodiments two or more chemically induced promoter gene sequence(s) are combined with a thermoregulated construct described herein. In one embodiment, the chemical and/or nutritional inducer is arabinose and the promoter is inducible by arabinose. In one embodiment, the chemical and/or nutritional inducer is IPTG and the promoter is inducible by IPTG. In one embodiment, the chemical and/or nutritional inducer is rhamnose and the promoter is inducible by rhamnose. In one embodiment, the chemical and/or nutritional inducer is tetracycline and the promoter is inducible by tetracycline.

[0471] In one embodiment, strains may comprise a combination of gene sequence(s), some of which are under control of a first inducible promoter, e.g., a FNR promoter and others which are under control of a second inducible promoter, e.g. a temperature sensitive promoter. In one embodiment, strains may comprise a combination of gene sequence(s), some of which are under control of a first inducible promoter, e.g., a chemically induced and others which are under control of a second inducible promoter, e.g. a temperature sensitive promoter. In some embodiments, strains may comprise one or more payload gene sequence(s) under the control of an FNR promoter and one or more payload gene sequence(s) under the control of a one or more promoter(s) which are induced by a one or more chemical and/or nutritional inducer(s), including, but not limited to, by arabinose, IPTG, rhamnose, tetracycline, and/or other chemical and/or nutritional inducers described herein or known in the art. Additionally the strains may comprise a construct which is under thermoregulatory control. In some embodiments, the bacteria strains further comprise payload sequences under the control of one or more constitutive promoter(s) active under aerobic conditions.

[0472] In some embodiments, genetically engineered strains comprise gene sequence(s) which are induced under aerobic culture conditions. In some embodiments, these strains further comprise FNR inducible gene sequence(s) for in vivo activation in the gut. In some embodiments, these strains do not further comprise FNR inducible gene sequence(s) for in vivo activation in the gut.

[0473] In some embodiments, genetically engineered strains comprise gene sequence(s), which are arabinose inducible under aerobic culture conditions. In some embodiments, these strains do not further comprise FNR inducible gene sequence(s) for in vivo activation in the gut.

[0474] In some embodiments, genetically engineered strains comprise gene sequence(s), which are IPTG inducible under aerobic culture conditions. In some embodiments, these strains further comprise FNR inducible gene sequence(s) for in vivo activation in the gut. In some embodiments, these strains do not further comprise FNR inducible gene sequence(s) for in vivo activation in the gut.

[0475] In some embodiments, genetically engineered strains comprise gene sequence(s) which are arabinose inducible under aerobic culture conditions. In some embodiments, such a strain further comprises sequence(s) which are IPTG inducible under aerobic culture conditions. In some embodiments, these strains further comprise FNR inducible gene payload sequence(s) for in vivo activation in the gut. In some embodiments, these strains do not further comprise FNR inducible gene sequence(s) for in vivo activation in the gut.

[0476] As evident from the above non-limiting examples, genetically engineered strains comprise inducible gene sequence(s) which can be induced numerous combinations. For example, rhamnose or tetracycline can be used as an inducer with the appropriate promoters in addition or in lieu of arabinose and/or IPTG or with thermoregulation. Additionally, such bacterial strains can also be induced with the chemical and/or nutritional inducers under anaerobic conditions.

[0477] Microaerobic Induction

[0478] In some embodiments, viability, growth, and activity are optimized by pre-inducing the bacterial strain under microaerobic conditions. In some embodiments, microaerobic conditions are best suited to “strike a balance” between optimal growth, activity and viability conditions and optimal conditions for induction; in particular, if the expression of the one or more payload(s) are driven by an anaerobic and/or low oxygen promoter, e.g., a FNR promoter. In such instances, cells are grown (e.g., for 1.5 to 3 hours) until they have reached a certain OD, e.g., ODs within the range of 0.1 to 10, indicating a certain density e.g., ranging from 1×10\hat{ }8 to 1×10 \hat{ }11, and exponential growth and are then induced through the addition of the inducer or through other means, such as shift to at a permissive temperature, for approximately 3 to 5 hours.

[0479] In one embodiment, expression of one or more payload(s) is under the control of one or more FNR promoter(s) and is induced during cell growth, cell expansion, fermentation, recovery, purification, formulation, and/or manufacture under microaerobic conditions.

[0480] In one embodiment, expression of one or more payload(s), is under the control of one or more FNR promoter(s) and is driven from the same promoter in the form of a multicistronic message under microaerobic conditions. In one embodiment, expression of one or more payload(s), is under the control of one or more FNR promoter(s) and is driven from the same promoter as two or more separate messages under microaerobic conditions. In one embodiment, expression of one or more payload(s), is under the control of one or more FNR promoter(s) and is driven from the one or more different promoters under microaerobic conditions.

[0481] Without wishing to be bound by theory, strains that comprise one or more payload(s) under the control of an FNR promoter, may allow expression of payload(s) from these promoters in vitro, under microaerobic culture conditions, and in vivo, under the low oxygen conditions found in the gut.

[0482] In some embodiments, promoters inducible by arabinose, IPTG, rhamnose, tetracycline, and/or other chemical and/or nutritional inducers can be induced under microaerobic conditions in the presence of the chemical and/or nutritional inducer. In particular, strains may comprise a combination of gene sequence(s), some of which are under control of FNR promoters and others which are under control of promoters induced by chemical and/or nutritional inducers. In some embodiments, strains may comprise one or more payload gene sequence(s) sequence(s) under the control of one or more FNR promoter(s) and one or more payload gene sequence(s) under the control of a one or more promoter(s) which are induced by a one or more chemical and/or nutritional inducer(s), including, but not limited to, arabinose, IPTG, rhamnose, tetracycline, and/or other chemical and/or nutritional inducers described herein or known in the art. In some embodiments, strains may comprise one or more payload gene sequence(s) under the control of one or more FNR promoter(s), and one or more payload gene sequence(s) under the control of a one or more constitutive promoter(s) described herein. In some embodiments, strains may comprise one or more payload gene sequence(s) under the control of an FNR promoter and one or more payload gene sequence(s) under the control of a one or more thermoregulated promoter(s) described herein.

[0483] In one embodiment, expression of one or more payload(s) is under the control of one or more promoter(s) regulated by chemical and/or nutritional inducers and is induced during cell growth, cell expansion, fermentation, recovery, purification, formulation, and/or manufacture under microaerobic conditions.

[0484] In one embodiment, expression of one or more payload(s), is under the control of one or more promoter(s) regulated by chemical and/or nutritional inducers and is driven from the same promoter in the form of a multicistronic message under microaerobic conditions. In one embodiment, expression of one or more payload(s), is under the control of one or more promoter(s) regulated by chemical and/or nutritional inducers and is driven from the same promoter as two or more separate messages under microaerobic conditions. In one embodiment, expression of one or more payload(s), is under the control of one or more promoter(s) regulated by chemical and/or nutritional inducers and is driven from the one or more different promoters under microaerobic conditions.

[0485] In one embodiment, strains may comprise a combination of gene sequence(s), some of which are under control of a first inducible promoter and others which are under control of a second inducible promoter, both induced by chemical and/or nutritional inducers, under microaerobic conditions. In one embodiment, strains may comprise a combination of gene sequence(s), some of which are under control of a first inducible promoter and others which are under control of a second inducible promoter, both induced by chemical and/or nutritional inducers. In some embodiments, the strains comprise gene sequence(s) under the control of a third inducible promoter, e.g., an anaerobic/low oxygen promoter or microaerobic promoter, e.g., FNR promoter. In one embodiment, strains may comprise a combination of gene sequence(s), some of which are under control of a first inducible promoter, e.g., a chemically induced promoter or a low oxygen or microaerobic promoter and others which are under control of a second inducible promoter, e.g. a temperature sensitive promoter. In one embodiment, strains may comprise a combination of gene sequence(s), some of which are under control of a first inducible promoter, e.g., a FNR promoter and others which are under control of a second inducible promoter, e.g. a temperature sensitive promoter. In one embodiment, strains may comprise a combination of gene sequence(s), some of which are under control of a first inducible promoter, e.g., a chemically induced and others which are under control of a second inducible promoter, e.g. a temperature sensitive promoter. In some embodiments, strains may comprise one or more payload gene sequence(s) under the control of an FNR promoter and one or more payload gene sequence(s) under the control of a one or more promoter(s) which are induced by a one or more chemical and/or nutritional inducer(s), including, but not limited to, by arabinose, IPTG, rhamnose, tetracycline, and/or other chemical and/or nutritional inducers described herein or known in the art. Additionally the strains may comprise a construct which is under thermoregulatory control. In some embodiments, the bacteria strains further comprise payload under the control of one or more constitutive promoter(s) active under low oxygen conditions.

[0486] Induction of Strains Using Phasing, Pulsing and/or Cycling

[0487] In some embodiments, cycling, phasing, or pulsing techniques are employed during cell growth, expansion, recovery, purification, fermentation, and/or manufacture to efficiently induce and grow the strains prior to in vivo administration. This method is used to “strike a balance” between optimal growth, activity, cell health, and viability conditions and optimal conditions for induction; in particular, if growth, cell health or viability are negatively affected under inducing conditions. In such instances, cells are grown (e.g., for 1.5 to 3 hours) in a first phase or cycle until they have reached a certain OD, e.g., ODs within the range of 0.1 to 10, indicating a certain density e.g., ranging from 1×10 \hat{ }8 to 1×10\hat{ }11, and are then induced through the addition of the inducer or through other means, such as shift to a permissive temperature (if a promoter is thermoregulated), or change in oxygen levels (e.g., reduction of oxygen level in the case of induction of an FNR promoter driven construct) for approximately 3 to 5 hours. In a second phase or cycle, conditions are brought back to the original conditions which support optimal growth, cell health and viability. Alternatively, if a chemical and/or nutritional inducer is used, then the culture can be spiked with a second dose of the inducer in the second phase or cycle.

[0488] In some embodiments, two cycles of optimal conditions and inducing conditions are employed (i.e, growth, induction, recovery and growth, induction). In some embodiments, three cycles of optimal conditions and inducing conditions are employed. In some embodiments, four or more cycles of optimal conditions and inducing conditions are employed. In a non-liming example, such cycling and/or phasing is used for induction under anaerobic and/or low oxygen conditions (e.g., induction of FNR promoters). In one embodiment, cells are grown to the optimal density and then induced under anaerobic and/or low oxygen conditions. Before growth and/or viability are negatively impacted due to stressful induction conditions, cells are returned to oxygenated conditions to recover, after which they are then returned to inducing anaerobic and/or low oxygen conditions for a second time. In some embodiments, these cycles are repeated as needed.

[0489] In some embodiments, growing cultures are spiked once with the chemical and/or nutritional inducer. In some embodiments, growing cultures are spiked twice with the chemical and/or nutritional inducer. In some embodiments, growing cultures are spiked three or more times with the chemical and/or nutritional inducer. In a non-limiting example, cells are first grown under optimal growth conditions up to a certain density, e.g., for 1.5 to 3 hour) to reached an of 0.1 to 10, until the cells are at a density ranging from 1×10 \hat{ }8 to 1×10\hat{ }11. Then the chemical inducer, e.g., arabinose or IPTG, is added to the culture. After 3 to 5 hours, an additional dose of the inducer is added to re-initiate the induction. Spiking can be repeated as needed.

[0490] In some embodiments, phasing or cycling changes in temperature in the culture. In another embodiment, adjustment of temperature may be used to improve the activity of a payload. For example, lowering the temperature during culture may improve the proper folding of the payload. In such instances, cells are first grown at a temperature optimal for growth (e.g., 37 C). In some embodiments, the cells are then induced, e.g., by a chemical inducer, to express the payload. Concurrently or after a set amount of induction time, the temperature in the media is lowered, e.g., between 25 and 35 C, to allow improved folding of the expressed payload.

[0491] In some embodiments, payload(s) are under the control of different inducible promoters, for example two different chemical inducers. In other embodiments, the payload is induced under low oxygen conditions or microaerobic conditions and a second payload is induced by a chemical inducer.

[0492] In one embodiment, expression of one or more payload(s) is under the control of one or more FNR promoter(s) and is induced during cell growth, cell expansion, fermentation, recovery, purification, formulation, and/or manufacture by using phasing or cycling or pulsing or spiking techniques.

[0493] In one embodiment, expression of one or more payload(s), is under the control of one or more FNR promoter(s) and is driven from the same promoter in the form of a multicistronic message through the employment of phasing or cycling or pulsing or spiking techniques. In one embodiment, expression of one or more payload(s), is under the control of one or more FNR promoter(s) and is driven from the same promoter as two or more separate messages through the employment of phasing or cycling or pulsing or spiking techniques. In one embodiment, expression of one or more payload(s), is under the control of one or more FNR promoter(s) and is driven from the one or more different promoters through the employment of phasing or cycling or pulsing or spiking techniques.

[0494] In some embodiments, promoters inducible by arabinose, IPTG, rhamnose, tetracycline, and/or other chemical and/or nutritional inducers can be induced through the employment of phasing or cycling or pulsing or spiking techniques in the presence of the chemical and/or nutritional inducer. In particular, strains may comprise a combination of gene sequence(s), some of which are under control of FNR promoters and others which are under control of promoters induced by chemical and/or nutritional inducers. In some embodiments, strains may comprise one or more payload gene sequence(s) under the control of one or more FNR promoter(s) and one or more payload gene sequence(s) under the control of a one or more promoter(s) which are induced by a one or more chemical and/or nutritional inducer(s), including, but not limited to, arabinose, IPTG, rhamnose, tetracycline, and/or other chemical and/or nutritional inducers described herein or known in the art. In some embodiments, strains may comprise one or more payload gene sequence(s) under the control of one or more FNR promoter(s), and one or more payload gene sequence(s) under the control of a one or more constitutive promoter(s) described herein and are induced through the employment of phasing or cycling or pulsing or spiking techniques. In some embodiments, strains may comprise one or more payload gene sequence(s) under the control of an FNR promoter and one or more payload gene sequence(s) under the control of a one or more thermoregulated promoter(s) described herein, and are induced through the employment of phasing or cycling or pulsing or spiking techniques.

[0495] Any of the strains described herein can be grown through the employment of phasing or cycling or pulsing or spiking techniques. In one embodiment, expression of one or more payload(s) is under the control of one or more promoter(s) regulated by chemical and/or nutritional inducers and is induced during cell growth, cell expansion, fermentation, recovery, purification, formulation, and/or manufacture under anaerobic and/or low oxygen conditions.

[0496] In one embodiment, expression of one or more payload(s), is under the control of one or more promoter(s) regulated by chemical and/or nutritional inducers and is driven from the same promoter in the form of a multicistronic message and which are induced through the employment of phasing or cycling or pulsing or spiking techniques. In one embodiment, expression of one or more payload(s), is under the control of one or more promoter(s) regulated by chemical and/or nutritional inducers and is driven from the same promoter as two or more separate messages and is grown through the employment of phasing or cycling or pulsing or spiking techniques. In one embodiment, expression of one or more payload(s), is under the control of one or more promoter(s) regulated by chemical and/or nutritional inducers and is driven from the one or more different promoters, all of which are induced through the employment of phasing or cycling or pulsing or spiking techniques.

[0497] In one embodiment, strains may comprise a combination of gene sequence(s), some of which are under control of a first inducible promoter and others which are under control of a second inducible promoter, both induced by chemical and/or nutritional inducers, through the employment of phasing or cycling or pulsing or spiking techniques. In one embodiment, strains may comprise a combination of gene sequence(s), some of which are under control of a first inducible promoter and others which are under control of a second inducible promoter, both induced by chemical and/or nutritional inducers through the employment of phasing or cycling or pulsing or spiking techniques. In some embodiments, the strains comprise gene sequence(s) under the control of a third inducible promoter, e.g., an anaerobic/low oxygen promoter, e.g., FNR promoter. In one embodiment, strains may comprise a combination of gene sequence(s), some of which are under control of a first inducible promoter, e.g., a chemically induced promoter or a low oxygen promoter and others which are under control of a second inducible promoter, e.g. a temperature sensitive promoter. In one embodiment, strains may comprise a combination of gene sequence(s), some of which are under control of a first inducible promoter, e.g., a FNR promoter and others which are under control of a second inducible promoter, e.g. a temperature sensitive promoter. In one embodiment, strains may comprise a combination of gene sequence(s), some of which are under control of a first inducible promoter, e.g., a chemically induced and others which are under control of a second inducible promoter, e.g. a temperature sensitive promoter. In some embodiments, strains may comprise one or more payload gene sequence(s) under the control of an FNR promoter and one or more payload gene sequence(s) under the control of a one or more promoter(s) which are induced by a one or more chemical and/or nutritional inducer(s), including, but not limited to, by arabinose, IPTG, rhamnose, tetracycline, and/or other chemical and/or nutritional inducers described herein or known in the art. Additionally the strains may comprise a construct which is under thermoregulatory control. In some embodiments, the bacteria strains further comprise payload sequence(s) under the control of one or more constitutive promoter(s) active under low oxygen conditions. Any of the strains described in these embodiments may be induced through the employment of phasing or cycling or pulsing or spiking techniques.

[0498] Aerobic Induction of the FNR Promoter

[0499] FNRS24Y is a mutated form of FNR which is more resistant to inactivation by oxygen, and therefore can activate FNR promoters under aerobic conditions (see e.g., Jervis AJ The O2 sensitivity of the transcription factor FNR is controlled by Ser24 modulating the kinetics of [4Fe-4S] to [2Fe-2S] conversion, Proc Natl Acad Sci USA. 2009 Mar. 24; 106(12):4659-64, the contents of which is herein incorporated by reference in its entirety). In some embodiments, an oxygen bypass system shown and described in figures and examples is used. In this oxygen bypass system, FNRS24Y is induced by addition of arabinose and then drives the expression of the protein of interest (e.g., one or more anti-cancer effector(s) described herein) by binding and activating the FNR promoter under aerobic conditions. Thus, strains can be grown, produced or manufactured efficiently under aerobic conditions, while being effectively pre-induced and pre-loaded, as the system takes advantage of the strong FNR promoter resulting in of high levels of expression of the protein of interest. This system does not interfere with or compromise in vivo activation, since the mutated FNRS24Y is no longer expressed in the absence of arabinose, and wild type FNR then binds to the FNR promoter and drives expression of the protein of interest, e.g., one or more gut barrier enhancer or anti-inflammatory effector(s) described herein.

[0500] In some embodiments, FNRS24Y is expressed during aerobic culture growth and induces a gene of interest. In other embodiments described herein, a second payload expression can also be induced aerobically, e.g., by arabinose. In a non-limiting example, a protein of interest and FNRS24Y can in some embodiments be induced simultaneously, e.g., from an arabinose inducible promoter. In some embodiments, FNRS24Y and the protein of interest are transcribed as a bicistronic message whose expression is driven by an arabinose promoter. In some embodiments, FNRS24Y is knocked into the arabinose operon, allowing expression to be driven from the endogenous Para promoter.

[0501] In some embodiments, a Lad promoter and IPTG induction are used in this system (in lieu of Para and arabinose induction). In some embodiments, a rhamnose inducible promoter is used in this system. In some embodiments, a temperature sensitive promoter is used to drive expression of FNRS24Y.

### Secretion

[0502] In any of the embodiments described herein, in which the genetically engineered organism, e.g., engineered bacteria, produces a protein, polypeptide, or peptide, DNA, RNA, small molecule or other molecule intended to be secreted from the microorganism, the engineered microorganism may comprise a secretion mechanism and corresponding gene sequence(s) encoding the secretion system.

[0503] In some embodiments, the recombinant bacteria further comprise a native secretion mechanism or non-native secretion mechanism that is capable of secreting the molecule from the bacterial cytoplasm in the extracellular environment. Many bacteria have evolved sophisticated secretion systems to transport substrates across the bacterial cell envelope. Substrates, such as small molecules, proteins, and DNA, may be released into the extracellular space or periplasm (such as the gut lumen or other space), injected into a target cell, or associated with the bacterial membrane.

[0504] In Gram-negative bacteria, secretion machineries may span one or both of the inner and outer membranes. In some embodiments, the recombinant bacteria further comprise a non-native double membrane-spanning secretion system. Double membrane-spanning secretion systems include, but are not limited to, the type I secretion system (T1SS), the type II secretion system (T2SS), the type III secretion system (T3SS), the type IV secretion system (T4SS), the type VI secretion system (T6SS), and the resistance-nodulation-division (RND) family of multi-drug efflux pumps (Pugsley 1993; Gerlach et al., 2007; Collinson et al., 2015; Costa et al., 2015; Reeves et al., 2015; WO2014138324A1, incorporated herein by reference). Examples of such secretion systems are shown in figures and examples. Mycobacteria, which have a Gram-negative-like cell envelope, may also encode a type VII secretion system (T7SS) (Stanley et al., 2003). With the exception of the T2SS, double membrane-spanning secretions generally transport substrates from the bacterial cytoplasm directly into the extracellular space or into the target cell. In contrast, the T2SS and secretion systems that span only the outer membrane may use a two-step mechanism, wherein substrates are first translocated to the periplasm by inner membrane-spanning transporters, and then transferred to the outer membrane or secreted into the extracellular space. Outer membrane-spanning secretion systems include, but are not limited to, the type V secretion or autotransporter system or autosecreter system (T5SS), the curli secretion system, and the chaperone-usher pathway for pili assembly (Saier, 2006; Costa et al., 2015).

[0505] In some embodiments in which the one or more proteins of interest, effector molecules or therapeutic proteins are secreted or exported from the microorganism, the engineered microorganism comprises gene sequence(s) that includes a secretion tag. In some embodiments, the one or more proteins of interest, effector molecules or therapeutic proteins include a “secretion tag” of either RNA or peptide origin to direct the one or more proteins of interest, effector molecules or therapeutic proteins to specific secretion systems. For example, a secretion tag for the Type I Hemolysin secretion system is encoded in the C-terminal 53 amino acids of the alpha hemolysin protein (HlyA).

[0506] In some embodiments, a Hemolysin-based Secretion System is used to secrete the molecule of interest, e.g., therapeutic peptide. Type I Secretion systems offer the advantage of translocating their passenger peptide directly from the cytoplasm to the extracellular space, obviating the two-step process of other secretion types. FIG. 9 shows the alpha-hemolysin (HlyA) of uropathogenic Escherichia coli. This pathway uses HlyB, an ATP-binding cassette transporter; HlyD, a membrane fusion protein; and TolC, an outer membrane protein. The assembly of these three proteins forms a channel through both the inner and outer membranes. HlyB inserts into inner membrane to form a pore, HlyD aligns HlyB with TolC (outer membrane pore) thereby forming a channel through inner and outer membrane. Natively, this channel is used to secrete HlyA, however, to secrete the therapeutic peptide of the present disclosure, the secretion signal-containing C-terminal portion of HlyA is fused to the C-terminal portion of a therapeutic peptide (star) to mediate secretion of this peptide. The C-terminal secretion tag can be removed by either an autocatalytic or protease-catalyzed e.g., OmpT cleavage thereby releasing the one or more proteins of interest or therapeutic proteins into the extracellular milieu. In some embodiments the one or more proteins of interest or therapeutic proteins contain expressed as fusion protein with the 53 amino acids of the C termini of alpha-hemolysin (hlyA) of E. coli CFT073 (C terminal secretion tag).

[0507] In some embodiments, a Type V Autotransporter Secretion System is used to secrete the molecule of interest, e.g., therapeutic peptide or effector molecule. The Type V Auto-secretion System utilizes an N-terminal Sec-dependent peptide tag (inner membrane) and C-terminal tag (outer-membrane). This system uses the Sec-system to get from the cytoplasm to the periplasm. The C-terminal tag then inserts into the outer membrane forming a pore through which the “passenger protein” threads through. Due to the simplicity of the machinery and capacity to handle relatively large protein fluxes, the Type V secretion system is attractive for the extracellular production of recombinant proteins. As shown in FIG. 8, a therapeutic peptide or effector molecule (star) can be fused to an N-terminal secretion signal, a linker, and the beta-domain of an autotransporter. The N-terminal, Sec-dependent signal sequence directs the protein to the SecA-YEG machinery which moves the protein across the inner membrane into the periplasm, followed by subsequent cleavage of the signal sequence. The Beta-domain is recruited to the Bam complex (‘Beta-barrel assembly machinery′) where the beta-domain is folded and inserted into the outer membrane as a beta-barrel structure. The therapeutic peptide or effector molecule is threaded through the hollow pore of the beta-barrel structure ahead of the linker sequence. Once across the outer membrane, the passenger is released from the membrane-embedded C-terminal tag by either an autocatalytic, intein-like mechanism (left side of Bam complex) or via a membrane-bound protease (black scissors; right side of Bam complex) (i.e., OmpT). For example, a membrane-associated peptidase to a complimentary protease cut site in the linker. Thus, in some embodiments, the secreted molecule, such as a heterologous protein or peptide comprises an N-terminal secretion signal, a linker, and beta-domain of an autotransporter so as to allow the molecule to be secreted from the bacteria.

[0508] The N-terminal tag is removed by the Sec system. Thus, in some embodiments, the secretion system is able to remove this tag before secreting the one or more proteins of interest, effector molecule or therapeutic proteins, from the engineered bacteria. In the Type V auto-secretion-mediated secretion the N-terminal peptide secretion tag is removed upon translocation of the “passenger” peptide from the cytoplasm into the periplasmic compartment by the native Sec system. Further, once the auto-secretor is translocated across the outer membrane the C-terminal secretion tag can be removed by either an autocatalytic or protease-catalyzed e.g., OmpT cleavage thereby releasing the molecule(s) into the extracellular milieu.

[0509] In some embodiments, the recombinant bacteria comprise a type III or a type III-like secretion system (T3SS) from Shigella, Salmonella, E. coli, Bivrio, Burkholderia, Yersinia, Chlamydia, or Pseudomonas. The traditional T3SS is capable of transporting a protein from the bacterial cytoplasm to the host cytoplasm through a needle complex. In the Type III traditional secretion system, the basal body closely resembles the flagella, however, instead of a “tail”/whip, the traditional T3SS has a syringe to inject the passenger proteins into host cells. The secretion tag is encoded by an N-terminal peptide (lengths vary and there are several different tags, see PCT/US14/020972). The N-terminal tag is not removed from the polypeptides in this secretion system.

[0510] The T3SS may be modified to secrete the molecule from the bacterial cytoplasm, but not inject the molecule into the host cytoplasm. Thus, the molecule is secreted into the gut lumen, tumor microenvironment, or other extracellular space. In some embodiments, the recombinant bacteria comprise said modified T3SS and are capable of secreting the molecule of interest from the bacterial cytoplasm. In some embodiments, the secreted molecule, such as a heterologous protein or peptide comprises a type III secretion sequence that allows the molecule of interest to be secreted from the bacteria.

[0511] In the Flagellar modified Type III Secretion, the tag is encoded in 5′-untranslated region of the mRNA and thus there is no peptide tag to cleave/remove. This modified system does not contain the “syringe” portion and instead uses the basal body of the flagella structure as the pore to translocate across both membranes and out through the forming flagella. If the fliC/fliD genes (encoding the flagella “tail”/whip) are disrupted the flagella cannot fully form and this promotes overall secretion. In some embodiments, the tail portion can be removed entirely.

[0512] In some embodiments, a flagellar type III secretion pathway is used to secrete the molecule of interest. In some embodiments, an incomplete flagellum is used to secrete a therapeutic peptide of interest by recombinantly fusing the peptide to an N-terminal flagellar secretion signal of a native flagellar component. In this manner, the intracellularly expressed chimeric peptide can be mobilized across the inner and outer membranes into the surrounding host environment.

[0513] For example, a modified flagellar type III secretion apparatus in which untranslated DNA fragment upstream of the gene fliC (encoding flagellin), e.g., a 173-bp region, is fused to the gene encoding the heterologous protein or peptide can be used to secrete polypeptides of interest (See, e.g., Majander et al., Extracellular secretion of polypeptides using a modified Escherichia coli flagellar secretion apparatus. Nat Biotechnol. 2005 April; 23(4):475-81). In some cases, the untranslated region from the fliC loci may not be sufficient to mediate translocation of the passenger peptide through the flagella. Here it may be necessary to extend the N-terminal signal into the amino acid coding sequence of FliC, for example, by using the 173 bp of untranslated region along with the first 20 amino acids of FliC (see, e.g., Duan et al., Secretion of Insulinotropic Proteins by Commensal Bacteria: Rewiring the Gut To Treat Diabetes, Appl. Environ. Microbiol. December 2008 vol. 74 no. 23 7437-7438).

[0514] In alternate embodiments, the recombinant bacteria further comprise a non-native single membrane-spanning secretion system. Single membrane-spanning transporters may act as a component of a secretion system, or may export substrates independently. Such transporters include, but are not limited to, ATP-binding cassette translocases, flagellum/virulence-related translocases, conjugation-related translocases, the general secretory system (e.g., the SecYEG complex in E. coli), the accessory secretory system in mycobacteria and several types of Gram-positive bacteria (e.g., Bacillus anthracis, Lactobacillus johnsonii, Corynebacterium glutamicum, Streptococcus gordonii, Staphylococcus aureus), and the twin-arginine translocation (TAT) system (Saier, 2006; Rigel and Braunstein, 2008; Albiniak et al., 2013). It is known that the general secretory and TAT systems can both export substrates with cleavable N-terminal signal peptides into the periplasm, and have been explored in the context of biopharmaceutical production. The TAT system may offer particular advantages, however, in that it is able to transport folded substrates, thus eliminating the potential for premature or incorrect folding. In certain embodiments, the recombinant bacteria comprise a TAT or a TAT-like system and are capable of secreting the molecule of interest from the bacterial cytoplasm. One of ordinary skill in the art would appreciate that the secretion systems disclosed herein may be modified to act in different species, strains, and subtypes of bacteria, and/or adapted to deliver different payloads.

[0515] In order to translocate a protein, e.g., therapeutic polypeptide, to the extracellular space, the polypeptide must first be translated intracellularly, mobilized across the inner membrane and finally mobilized across the outer membrane. Many effector proteins (e.g., therapeutic polypeptides)—particularly those of eukaryotic origin—contain disulphide bonds to stabilize the tertiary and quaternary structures. While these bonds are capable of correctly forming in the oxidizing periplasmic compartment with the help of periplasmic chaperones, in order to translocate the polypeptide across the outer membrane the disulphide bonds must be reduced and the protein unfolded again.

[0516] One way to secrete properly folded proteins in gram-negative bacteria—particularly those requiring disulphide bonds—is to target the reducing-environment periplasm in conjunction with a destabilizing outer membrane. In this manner the protein is mobilized into the oxidizing environment and allowed to fold properly. In contrast to orchestrated extracellular secretion systems, the protein is then able to escape the periplasmic space in a correctly folded form by membrane leakage. These “leaky” gram-negative mutants are therefore capable of secreting bioactive, properly disulphide-bonded polypeptides. In some embodiments, the recombinant bacteria have a “leaky” or de-stabilized outer membrane. Destabilizing the bacterial outer membrane to induce leakiness can be accomplished by deleting or mutagenizing genes responsible for tethering the outer membrane to the rigid peptidoglycan skeleton, including for example, lpp, ompC, ompA, ompF, tolA, tolB, pal, degS, degP, and nlpl. Lpp is the most abundant polypeptide in the bacterial cell existing at ˜500,000 copies per cell and functions as the primary ‘staple’ of the bacterial cell wall to the peptidoglycan. 1.

[0517] Silhavy, T. J., Kahne, D. & Walker, S. The bacterial cell envelope. Cold Spring Harb Perspect Biol 2, a000414 (2010). TolA-PAL and OmpA complexes function similarly to Lpp and are other deletion targets to generate a leaky phenotype. Additionally, leaky phenotypes have been observed when periplasmic proteases are inactivated. The periplasm is very densely packed with protein and therefore encode several periplasmic proteins to facilitate protein turnover. Removal of periplasmic proteases such as degS, degP or nlpl can induce leaky phenotypes by promoting an excessive build-up of periplasmic protein. Mutation of the proteases can also preserve the effector polypeptide by preventing targeted degradation by these proteases. Moreover, a combination of these mutations may synergistically enhance the leaky phenotype of the cell without major sacrifices in cell viability. Thus, in some embodiments, the engineered bacteria have one or more deleted or mutated membrane genes. In some embodiments, the engineered bacteria have a deleted or mutated lpp gene. In some embodiments, the engineered bacteria have one or more deleted or mutated gene(s), selected from ompA, ompA, and ompF genes. In some embodiments, the engineered bacteria have one or more deleted or mutated gene(s), selected from tolA, tolB, and pal genes. In some embodiments, the engineered bacteria have one or more deleted or mutated periplasmic protease genes. In some embodiments, the engineered bacteria have one or more deleted or mutated periplasmic protease genes selected from degS, degP, and nlpl. In some embodiments, the engineered bacteria have one or more deleted or mutated gene(s), selected from lpp, ompA, ompF, tolA, tolB, pal, degS, degP, and nlpl genes.

[0518] To minimize disturbances to cell viability, the leaky phenotype can be made inducible by placing one or more membrane or periplasmic protease genes, e.g., selected from lpp, ompA, ompF, tolA, tolB, pal, degS, degP, and nlpl, under the control of an inducible promoter. For example, expression of lpp or other cell wall stability protein or periplasmic protease can be repressed in conditions where the therapeutic polypeptide needs to be delivered (secreted). For instance, under inducing conditions a transcriptional repressor protein or a designed antisense RNA can be expressed which reduces transcription or translation of a target membrane or periplasmic protease gene. Conversely, overexpression of certain peptides can result in a destabilized phenotype, e.g., overexpression of colicins or the third topological domain of TolA, wherein peptide overexpression can be induced in conditions in which the therapeutic polypeptide needs to be delivered (secreted). These sorts of strategies would decouple the fragile, leaky phenotypes from biomass production. Thus, in some embodiments, the engineered bacteria have one or more membrane and/or periplasmic protease genes under the control of an inducible promoter.

[0519] Table 9 and Table 10 below lists secretion systems for Gram positive bacteria and Gram negative bacteria.

TABLE 9
Secretion systems for gram positive bacteria

| Bacterial Strain | Relevant Secretion System |
|---|---|
| C. novyi-NT (Gram+) | Sec pathway |
| | Twin- arginine (TAT) pathway |
| C. butryicum (Gram+) | Sec pathway |
| | Twin- arginine (TAT) pathway |
| Listeria monocytogenes (Gram +) | Sec pathway |
| | Twin- arginine (TAT) pathway |

TABLE 10
Secretion Systems for Gram negative bacteria
Protein secretary pathways (SP) in gram-negative bacteria and their descendants

| | | | | | | | |
|---|---|---|---|---|---|---|---|
| Type | | | | | | # | Energy |
| (Abbrev.) | Name | TC#² | Bacteria | Archaea | Eukarya | Proteins/System | Source |

IMPS - Gram-negative bacterial inner membrane channel-forming translocases

| | | | | | | | |
|---|---|---|---|---|---|---|---|
| ABC | ATP binding | 3.A.1 | + | + | + | 3-4 | ATP |
| (SIP) | cassette translocase | | | | | | |
| SEC | General secretory | 3.A.5 | + | + | + | ~12 | GTP OR |
| (IISP) | translocase | | | | | | ATP + PMF |
| Fla/Path | Flagellum/virulence- | 3.A.6 | + | − | − | >10 | ATP |
| (IIISP) | related translocase | | | | | | |
| Conj | Conjugation-related | 3.A.7 | + | − | − | >10 | ATP |
| (IVSP) | translocase | | | | | | |
| Tat (IISP) | Twin-arginine | 2.A.64 | + | + | + | 2-4 | PMF |
| | targeting translocase | | | | (chloroplasts) | | |
| Oxal | Cytochrome oxidase | 2.A.9 | + | + | + | 1 | None or |
| (YidC) | biogenesis family | | | | (mitochondria | | PMF |
| | | | | | chloroplasts) | | |
| MscL | Large conductance | 1.A.22 | + | + | + | 1 | None |
| | mechanosensitive | | | | | | |
| | channel family | | | | | | |
| Holins | Holin functional | 1.E.1•21 | + | − | − | 1 | None |
| | superfamily | | | | | | |

Eukaryotic Organelles

| | | | | | | | |
|---|---|---|---|---|---|---|---|
| MPT | Mitochondrial | 3.A.B | − | − | + | >20 | ATP |
| | protein translocase | | | | (mitochondrial) | | |
| CEPT | Chloroplast envelope | 3.A.9 | (+) | − | + | ≥3 | GTP |
| | protein translocase | | | | (chloroplasts) | | |
| Bcl-2 | Eukaryotic Bcl-2 family | 1.A.21 | − | − | + | 1? | None |
| | (programmed cell death) | | | | | | |

Gram-negative bacterial outer membrane channel-forming translocases

| | | | | | | | |
|---|---|---|---|---|---|---|---|
| MTB | Main terminal branch of | 3.A.15 | +^{b} | − | − | ~14 | ATP; |
| (IISP) | the general secretory | | | | | | PMF |
| | translocase | | | | | | |
| FUP AT-1 | Fimbrial usher protein | 1.B.11 | +^{b} | − | − | 1 | None |
| | Autotransporter-1 | 1.B.12 | +^{b} | | − | 1 | None |
| AT-2 | Autotransporter-2 | 1.B.40 | +^{b} | − | − | 1 | None |
| OMF | | 1.B.17 | +^{b} | | +(?) | 1 | None |
| (ISP) | | | | | | | |
| TPS | | .B.20 | + | − | + | 1 | None |
| Secretin | | .B.22 | +^{b} | | − | 1 | None |
| (IISP and IISP) | | | | | | | |
| OmpIP | Outer membrane | 1.B.33 | + | − | + | ≥4 | None |
| | insertion porin | | | | (mitochondria; | | |
| | | | | | chloroplasts) | | |

[0520] The above tables for gram positive and gram negative bacteria list secretion systems that can be used to secrete polypeptides and other molecules from the engineered bacteria (Milton H. Saier, Jr. Microbe/Volume 1, Number 9, 2006 “Protein Secretion Systems in Gram-Negative Bacteria Gram-negative bacteria possess many protein secretion-membrane insertion systems that apparently evolved independently”, the contents of which is herein incorporated by reference in its entirety).

[0521] In some embodiments, the recombinant bacterial comprise a native or non-native secretion system described herein for the secretion of a molecule, e.g., a cytokine, antibody (e.g., scFv), metabolic enzyme, e.g., kynureninase, an others described herein.

[0522] Polypeptide Sequences of exemplary secretion tags include PhoA (SEQ ID NO: 385), PhoA (SEQ ID NO: 386), OmpF (SEQ ID NO: 387), cvaC (SEQ ID NO: 388), TorA (SEQ ID NO: 389), fdnG (SEQ ID NO: 390), dmsA (SEQ ID NO: 391), PelB (SEQ ID NO: 392), HlyA secretion signal (SEQ ID NO: 393), and HlyA secretion signal (SEQ ID NO: 394). In some embodiments, secretion tags of endogenous secreted proteins from E. coli can be used to secrete the protein of interest. Exemplary secretion tags from secreted E coli Nissle include ECOLIN_05715 Secretion signal (SEQ ID NO: 395), ECOLIN_16495 Secretion signal (SEQ ID NO: 396), ECOLIN_19410 Secretion signal (SEQ ID NO:397), and ECOLIN_19880 Secretion signal (SEQ ID NO:398). Additional secretion tags include adhesion (SEQ ID NOS: 1091 and 1099), DsbA (SEQ ID NOS: 1092 and 1100), GltI (SEQ ID NOS: 1093 and 1101), GspD (SEQ ID NOS: 1089 and 1102), HdeB (SEQ ID NOS: 1090 and 1103), MalE (SEQ ID NOS: 1094 and 1104), OppA (SEQ ID NOS: 1095 and 1105), PelB (SEQ ID NOS: 1096 and 1106), PhoA (SEQ ID NOS: 1097 and 1107) and PpiA (SEQ ID NOS: 1098 and 1108).

[0523] In some embodiments, recombinant bacteria comprise a nucleic acid sequence that encodes a polypeptide which is at least about 80%, 85%, 90%, 95%, or 99% homologous to one or more of the sequences of SEQ ID NOS: 385-398 and 1089-1108, or a nucleic acid sequence which is at least about 80%, 85%, 90%, 95%, or 99% homologous to one or more of the sequences of SEQ ID NOS: 385-398 and 1089-1108. Any secretion tag or secretion system can be combined with any cytokine described herein, and can be used to generate a construct (plasmid based or integrated) which is driven by an directly or indirectly inducible or constitutive promoter described herein. In some embodiments, the secretion system is used in combination with one or more genomic mutations, which leads to the leaky or diffusible outer membrane phenotype (DOM), including but not limited to, lpp, nlP, tolA, PAL.

[0524] In some embodiments, the secretion system is selected from the type III flagellar, modified type III flagellar, type I (e.g., hemolysin system), type II, type IV, type V, type VI, and type VII secretion systems, resistance-nodulation-division (RND) multi-drug efflux pumps, a single membrane secretion system, Sec and, TAT secretion systems.

[0525] Any of the secretion systems described herein may according to the disclosure be employed to secrete the polypeptides of interest. In some embodiments, the therapeutic proteins secreted by the recombinant bacteria are modified to increase resistance to proteases, e.g. intestinal proteases.

[0526] In some embodiments, the genetically engineered microorganisms are capable of expressing any one or more of the described circuits in low-oxygen conditions, and/or in the gut, or tissue specific molecules or metabolites, and/or in the presence of molecules or metabolites associated with inflammation or immune suppression, and/or in the presence of metabolites that may be present in the gut, and/or in the presence of metabolites that may or may not be present in vivo, and may be present in vitro during strain culture, expansion, production and/or manufacture, such as arabinose and others described herein. In some embodiments, the gene sequences(s) are controlled by a promoter inducible by such conditions and/or inducers. In some embodiments, the gene sequences(s) are controlled by a constitutive promoter, as described herein. In some embodiments, the gene sequences(s) are controlled by a constitutive promoter, and are expressed in in vivo conditions and/or in vitro conditions, e.g., during expansion, production and/or manufacture, as described herein.

[0527] In some embodiments, any one or more of the described circuits are present on one or more plasmids (e.g., high copy or low copy) or are integrated into one or more sites in the microorganisms chromosome. Also, in some embodiments, the genetically engineered microorganisms are further capable of expressing any one or more of the described circuits and further comprise one or more of the following: (1) one or more auxotrophies, such as any auxotrophies known in the art and provided herein, e.g., thyA auxotrophy, (2) one or more kill switch circuits, such as any of the kill-switches described herein or otherwise known in the art, (3) one or more antibiotic resistance circuits, (4) one or more transporters for importing biological molecules or substrates, such any of the transporters described herein or otherwise known in the art, (5) one or more secretion circuits, such as any of the secretion circuits described herein and otherwise known in the art, (6) one or more surface display circuits, such as any of the surface display circuits described herein and otherwise known in the art and (7) one or more circuits for the production or degradation of one or more metabolites described herein (8) combinations of one or more of such additional circuits.

[0528] Non-limiting examples of proteins of interest are described herein. These polypeptides may be mutated to increase stability, resistance to protease digestion, and/or activity.

TABLE 11
Comparison of Secretion systems for secretion of polypeptide from engineered bacteria

| Secretion System | Tag | Cleavage | Advantages | Other features |
|---|---|---|---|---|
| Modified Type III | mRNA (or | No cleavage | No peptide | May not be as suited for |
| (flagellar) | N-terminal) | necessary | tag | larger proteins |
| | | | Endogenous | Deletion of flagellar genes |
| Type V | N- and C- | Yes | Large proteins | 2-step secretion |
| autotransport | terminal | | Endogenous | |
| | | | Cleavable | |
| Type I | C-terminal | No | | Tag; Exogenous Machinery |
| Diffusible Outer | N-terminal | Yes | Disulfide bond | May affect cell |
| Membrane (DOM) | | | formation | fragility/survivability/ |
| | | | | growth/yield |

[0529] In some embodiments, the therapeutic polypeptides of interest are secreted using components of the flagellar type III secretion system. In a non-limiting example, such a therapeutic polypeptide of interest are secreted via Type I Hemolysin Secretion, is assembled behind a fliC-5′UTR (e.g., 173-bp untranslated region from the fliC loci), and is driven by the native promoter. In other embodiments, the expression of the therapeutic peptide of interested secreted using components of the flagellar type III secretion system is driven by a tet-inducible promoter. In alternate embodiments, an inducible promoter such as oxygen level-dependent promoters (e.g., FNR-inducible promoter), promoters induced by IBD specific molecules or promoters induced by inflammation or an inflammatory response (RNS, ROS promoters), and promoters induced by a metabolite that may or may not be naturally present (e.g., can be exogenously added) in the gut, e.g., arabinose is used. In some embodiments, the therapeutic polypeptide of interest is expressed from a plasmid (e.g., a medium copy plasmid). In some embodiments, the therapeutic polypeptide of interest is expressed from a construct which is integrated into fliC locus (thereby deleting fliC), where it is driven by the native FliC promoter. In some embodiments, an N terminal part of FliC (e.g., the first 20 amino acids of FliC) is included in the construct, to further increase secretion efficiency.

[0530] In some embodiments, the therapeutic polypeptides of interest are secreted via Type I Hemolysin Secretion, are secreted using via a diffusible outer membrane (DOM) system. In some embodiments, the therapeutic polypeptide of interest is fused to a N-terminal Sec-dependent secretion signal. Non-limiting examples of such N-terminal Sec-dependent secretion signals include PhoA, OmpF, OmpA, and cvaC. In alternate embodiments, the therapeutic polypeptide of interest is fused to a Tat-dependent secretion signal. Exemplary Tat-dependent tags include TorA, FdnG, and DmsA.

[0531] In certain embodiments, the recombinant bacteria comprise deletions or mutations in one or more of the outer membrane and/or periplasmic proteins. Non-limiting examples of such proteins, one or more of which may be deleted or mutated, include lpp, pal, tolA, and/or nlpl. In some embodiments, lpp is deleted or mutated. In some embodiments, pal is deleted or mutated. In some embodiments, tolA is deleted or mutated. In other embodiments, nlpl is deleted or mutated. In yet other embodiments, certain periplasmic proteases are deleted or mutated, e.g., to increase stability of the polypeptide in the periplasm. Non-limiting examples of such proteases include degP and ompT. In some embodiments, degP is deleted or mutated. In some embodiments, ompT is deleted or mutated. In some embodiments, degP and ompT are deleted or mutated.

[0532] In some embodiments, the therapeutic polypeptides of interest are secreted via Type I Hemolysin Secretion, are secreted via a Type V Auto-secretor (pic Protein) Secretion. In some embodiments, the therapeutic protein of interest is expressed as a fusion protein with the native Nissle auto-secreter E. coli_01635 (where the original passenger protein is replaced with the therapeutic polypeptides of interest.

[0533] In some embodiments, the therapeutic polypeptides of interest are secreted via Type I Hemolysin Secretion, are secreted via Type I Hemolysin Secretion. In one embodiment, therapeutic polypeptide of interest is expressed as fusion protein with the 53 amino acids of the C terminus of alpha-hemolysin (hlyA) of E. coli CFT073.

### Surface Display

[0534] In some embodiments, the recombinant bacteria and/or microorganisms encode one or more gene(s) and/or gene cassette(s) encoding an anti-cancer molecule which is anchored or displayed on the surface of the bacteria and/or microorganisms. Examples of the anti-cancer molecules which are displayed or anchored to the bacteria and/or microorganism, are any of the anti-cancer molecules described herein, and include but are not limited to antibodies, e.g., scFv fragments, and tumor-specific antigens or neoantigens. In a non-limiting example, the antibodies or scFv fragments which are anchored or displayed on the bacterial cell surface are directed against checkpoint inhibitors described herein, including, but not limited to, CLTLA4, PD-1, PD-L1.

[0535] In some embodiments, the recombinant bacteria comprise one or more gene sequence(s) encoding therapeutic polypeptide or effector molecule, e.g., a ScFv, which is anchored or displayed on the surface of the bacteria, and which remains anchored while exerting its effector function. In other embodiments, the recombinant bacteria encoding the surface-displayed therapeutic polypeptide, e.g., the antibodies or scFv fragments, lyse before, during or after exerting their effector function. In some embodiments, the recombinant bacteria encode a therapeutic peptide that is temporarily attached to the cell surface and which dissociates from the bacterium before, during, or after exerting its function.

[0536] In some embodiments, shorter peptides or polypeptides, e.g. peptides or polypeptides of less than 60 amino acids of length, are displayed on the cell surface of the recombinant bacteria. In some embodiments, such shorter peptides or polypeptides comprise a immune modulatory effector molecule. Non-limiting examples of such therapeutic polypeptides are described herein.

[0537] Several strategies for the display of shorter peptides or polypeptides on the surface of gram negative bacteria are known in the art, and are for example described in Georgiou et al., Display of heterologous proteins on the surface of microorganisms: from the screening of combinatorial libraries to live recombinant vaccines: Nat Biotechnol. 1997 January; 15(1):29-34, the contents of which is herein incorporated by reference in its entirety. These systems all share a common theme, targeting recombinant proteins to the cell surface by the construction of gene fusions using sequences from membrane-anchoring domains of surface proteins.

[0538] Non-limiting examples of such strategies are described in Tables 12-14.

TABLE 12
Exemplary Cell Surface Display Strategies

| | Exemplary | | Localization of |
|---|---|---|---|
| | carrier | | heterologous |
| Carrier protein | organism | Type of fusion | polypeptide |
| LamB | E. coli | Sandwich fusion | Cell surface |
| PhoE | E. coli | Sandwich fusion | Cell surface |
| OprF | Pseudomonas | Sandwich fusion | Cell surface |
| Gram negative | E. coli | C-terminal or | Periplasmic side or |
| lipoproteins | | sandwich fusion | outer membrane/ |
| | | | Cell surface |
| Lpp-OmpA | E. coli | C-terminal fusion | Cell surface |
| VirG | Shigella | N-terminal | Cell surface |
| | | fusion | |
| IgA | Neisseria | N-terminal | Cell surface |
| | | fusion | |
| Flagellin (FliC) | E. coli | Sandwich fusion | Cell surface |
| Flagellin (FliC) | E. coli | Sandwich fusion | Cell surface |
| FimH (type I | E. coli | Sandwich fusion | Cell surface |
| pili) | | | |
| PapA (Pap pili) | E. coli | Sandwich fusion | Cell surface |
| PulA | Klebsiella | C-terminal fusion | Cell surface/ |
| | | | extracellular fluid |

TABLE 13
Exemplary Cell Surface Display Strategies

| | |
|---|---|
| Carrier | Passenger size |

Outer membrane Proteins

| | | |
|---|---|---|
| OmpA | 15-514 | aa |
| OmprF | 17-43 | aa |
| LamB | 11-232 | aa |
| OmpS | 38-115 | aa |
| OmpC | 162 | aa |
| PhoE | 8-32 | aa |
| Invasin | 18 | aa |
| LppOmpA | < or =40 | kDa |

Lipoproteins

| TraT | 11-98 | aa |
|---|---|---|
| PAL | Approx.. 250 aa | |
| OprI | 16 | aa |

| | |
|---|---|
| Inp | Less than or equal 47 kDa |

Autotransporters

| Igabeta | 12 | kDa |
|---|---|---|
| VirGbeta | Approx.. 50 kDa | |
| AIDA-1 | 12-40 | kDa |

Secreted

Pullulanase

Subunits of Surface Appendages

| | | |
|---|---|---|
| Flagellae | 11-115 | aa |
| Fimbriae | 7-52 | aa |

S-layer proteins

| | | |
|---|---|---|
| RsaA | 12 | aa |

TABLE 14
Exemplary Cell Surface Strategies

| | | |
|---|---|---|
| | | Passenger |
| Outer membrane protein | Type of fusion | size (kDa) |

Outer membrane protein

| | | |
|---|---|---|
| eCPX derived from OmpX | Biterminal | 0.8-1.6 |
| FhuA | Insertional | 1.1-3.3 |
| LamB | Insertional | 1.2-25.5 |
| Omp1 | C-terminal | 56 |
| OmpA | Insertional | 1-50 |
| OmpC | Insertional, | 18-52 |
| | C-terminal | |
| OmpT | | 35 |
| OprF | C-terminal | 50 |
| PgsA | C-terminal | 34-77 |
| Wza-omp orf1/OmpU/Omp26La | C-terminal | 27-50 |

Surface Appendages

| | | |
|---|---|---|
| F Pillin | Insertional | 1.6 |
| Fimbria (FimH and FimA) | Insertional | 1-4 |
| Flagellin (FliC and FliD) | Insertional | 1.2-33 |

Lipoproteins

| | | |
|---|---|---|
| INP | C-terminal | 7-119 |
| Lpp = OmpA | C-terminal | 27-74 |
| PAL | N-terminal | 29 |
| Tat-dependent lipoprotein | C-terminal | 27 |
| TraT | Insertional, C-terminal | 1.2-11 |

Virulence Factors

| | | |
|---|---|---|
| AIDA-1 | N-terminal | 12-65 |
| EaeA | C-terminal | 3.9-31.6 |
| EspP | N-terminal | 20 |
| EstA | N-terminal | 38-60 |
| Invasin | C-terminal | 1.1 |
| MSP1a | N-terminal | 4.6 |

[0539] In some embodiments, the recombinant bacteria comprise one or more gene sequence(s) encoding one or more short therapeutic peptides or polypeptides fused into surface exposed loops of outer membrane proteins (OMPs), e.g., from enteric bacteria. In a non-limiting example, the short therapeutic peptides or polypeptides expressed by the recombinant bacteria are inserted into the outer membrane protein LamB, e.g., from E. coli, and displayed on the bacterial cell surface. Extracellular display of peptides through Insertion of peptides into surface exposed loops of LamB is for example described in Hofnung et al., Methods Cell Biol. 34:77-105, and Charbit, A. et al., 1987. J. Immunol. 139:1658-1664.

[0540] In another non-limiting example, the short therapeutic peptides or polypeptides encoded by one or more gene sequence(s) comprised in the recombinant bacteria are inserted into the outer membrane protein PhoE, e.g., from E. coli, and displayed on the bacterial cell surface. The PhoE protein is another abundant outer membrane protein of E. coli K-12, which has a trimeric structure and functions as a pore for small molecules. Analysis of the primary structure of PhoE revealed 16 beta sheets which traverse through the membranes, and eight hypervariable regions exposed at the surface of the cell. One or more of these cell surface exposed regions of PhoE protein can be used to insert heterologous peptides. For example, antigenic determinants of pathogenic organisms have been presented in one or more cell surface exposed regions of PhoE protein (e.g., as described in Aterberg et al., 1990; Vaccine. 1990 February; 8(1):85-91).

[0541] In some embodiments, the recombinant bacteria comprise one or more gene sequence(s) encoding one or more short therapeutic peptides or polypeptides fused to protein components of extracellular appendages. Several systems have been described, in which extracellular appendages, such as pili and flagella are used to display peptides of interest at the bacterial cell surface. Examples of flagellar and pilar proteins used include FliC, a major structural component of the E. coli flagellum, and PapA, the major subunit of the Pap pilus. In one embodiment, the recombinant bacteria comprise one or more gene sequence(s) encoding one or more components of a FLITRX system. The FLITRX system is an E. coli display system based on the use of fusion protein of FliC and thioredoxin, a small redox protein which represents a highly versatile scaffold that allows peptide inserts to assume a confirmation compatible with binding to other proteins. In the FLITRX system, thioredoxin is fused into a dispensable region of FliC. Then, heterologous peptides can be inserted within the thioredoxin domain in the FliC fusion, and are surface exposed. Other scaffolding proteins are known in the art, some of which may replace thioredoxin as a scaffolding protein in this system.

[0542] In some embodiments, the recombinant bacteria comprise a FimH fusion protein, in which the therapeutic peptide of interest is fused to FimH, an adhesin of type 1 fimbriae, e.g., from E. coli. FimH adhesin chimeras containing as many as 56 foreign amino acids in certain positions are transported to the bacterial surface as components of the fimbrial organelles (Pallesen et al., Microbiology 141: 2839-2848).

[0543] In some embodiments, the recombinant bacteria comprise one or more gene sequence(s) encoding a fusion protein in which the therapeutic peptide of interest is fused to the major subunit of F11 fimbriae, e.g., from E. coli. Hypervariable regions of the major subunit of F11 fimbriae can be used for insertion of heterologous peptides, e.g., antigenic epitopes (Van Die et al., Mol. Gen. Genet. 222: 297-303).

[0544] In one embodiment, the recombinant bacteria comprise one or more gene sequence(s) encoding a papA fusion protein, in which the therapeutic peptide of interest is fused to papA. In some embodiments, peptides of interest are inserted following either codon 7 or 68 of the coding sequence for the mature portion of PapA, as peptides in the area of amino acids 7 and 68 of PapA are localized at the external side of the pilus (Steidler et al., J Bacteriol. 1993 December; 175(23):7639-43).

[0545] In some embodiments, the recombinant bacteria comprise one or more gene sequence(s), which encode polypeptides larger than 60 amino acids, e g, immune modulatory effector, and which are displayed on the bacterial cell surface. In some embodiments, the recombinant bacteria comprise one or more gene sequence(s), which encode a fusion protein, in which a therapeutic peptide of interest, e.g., a polypeptide greater than 60 amino acids in length, is fused to a lipoprotein from a gram negative bacterium, or one or more fragments thereof.

[0546] In one embodiment, the recombinant bacteria comprise one or more gene sequence(s), which encode a fusion protein, in which a therapeutic protein of interest is fused to peptidoglycan associated lipoprotein (PAL) or a fragment thereof. The fusion protein in located in the periplasm and can be displayed externally upon permeablization of the outer membrane. For example, a PAL-scFv fusion protein was shown to bind its antigen and to be tightly bound to the murein layer of the cell envelope (Fuchs et al., Biotechnology (N Y). 1991 December; 9(12):1369-72). The PAL-scFv fusion was located in the periplasm and bound to the murein layer, and after permeabilization of the outer membrane, the scFv became accessible to externally added antigen. In some embodiments, the recombinant bacteria comprising a fusion protein for surface display further have a permeable outer membrane. Mutations and/or deletions resulting in a leaky outer membrane are described elsewhere herein.

[0547] In one embodiment, the recombinant bacteria encode a fusion protein, in which a therapeutic protein of interest, e.g., a immune modulatory effector, is fused to residues of the major lipoprotein of a gram negative bacterium, e.g., E. coli. In one embodiment, the recombinant bacteria encode a fusion protein, in which a therapeutic protein of interest, is fused to the signal peptide and the nine N-terminal amino acid residues of the major lipoprotein of a gram negative bacterium, e.g., E. coli. These residues of the E. coli major lipoprotein function as a hydrophobic membrane anchor. For example, a fusion construct of these residues with a therapeutic polypeptide, in this case a scFv fragment, resulted in specific accumulation of an immunoreactive and cell-bound polypeptide in E. coli (Laukkanen et al., Mol. Microbiol. 4:1259-1268).

[0548] In one embodiment, the recombinant bacteria encode a fusion protein, in which a therapeutic protein of interest, is inserted into the TraT protein of a gram negative bacterium, e.g., E. coli, e.g. at position 180. The TraT protein is a surface-exposed lipoprotein, specified by plasmids of the IncF group, that mediates serum resistance and surface exclusion. Taylor et al. showed that insertion of the C3 epitope of polio virus, e.g., at position 180, allowed exposure of the antigen to the cell surface, while the oligomeric conformation of the wild-type protein was maintained (Taylor et al., Mol Microbiol. 1990 August; 4(8):1259-68).

[0549] In one embodiment, the recombinant bacteria comprise one or more genes and/or gene cassettes encoding a fusion protein comprising a Lpp-OmpA display vehicle comprising the N terminal outer membrane signal from the major lipoprotein (Lpp) fused to a domain from the outer membrane protein OmpA, fused to the therapeutic polypeptide of interest. In this system, the Lpp signal peptide mediates localization, and OmpA provides the framework for the display of the therapeutic protein of interest. Lpp-OmpA fusions have been used to display several proteins between 20 and 54 kDa in size on the surface of E. coli (see, e.g., Staphopoulos et al.). For example, Fransco et al fused beta-lactamase to the N-terminal targeting sequence of Lpp and an OmpA fragment containing 5 of the 8 membrane spanning loops of the native protein. This fusion protein was assembled on the cell surface and the beta-lactamase domain was stably anchored in the cell wall (Fransisco et al., PNAS Vol 89, pp. 2713-2717, 1992).

[0550] In one embodiment, the Type II secretion pathway or a variation thereof is used to for transient or longer duration display of therapeutic proteins of interest on the bacterial cell surface, e.g., the IgA protease secretion pathway of Neisseria or the VirG protein pathway of Shigella. In one embodiment, the IgA protease secretion pathway is used to export and display therapeutic peptides of interest on the cell surface of gram negative bacteria. The IgA proteases of Neisseria gonorrhoeae and Hemophilus influenza use a variation of the most common, Type II secretion pathway, to achieve extracellular export independent of any other gene products. The IgA genes of Neisseria species encode extracellular proteins that cleave human IgA1 antibody. The iga gene alone is sufficient to direct selected extracellular secretion of IgA protease in Neisseria, Salmonella, and E. coli species (Klauser et al., 1993, EMBO J 9:1991-1999, and references therein). The mature IgA protease is processed in several steps from a large precursor by signal peptidase and autoproteolytic cleavage. The precursor consists of four domains: (1) an aminoterminal signal peptide which mediates inner membrane transport; (2) the protease domain (3) the alpha domain, a basic alpha helical region which is secreted with the protease and (4) the autotransporter beta domain which harbors the essential function for outer membrane transport. Essentially, the C-terminal beta autotransporter domain of the IgA protease forms a channel in the outer membrane that mediates the export of the N terminal domain across the membrane, which in turn becomes transiently displayed on the external surface of the bacteria. The alpha domain and protease domain are then released through proteolytic cleavage. Klauser et al. (1993), showed that replacement of the native N-terminal domains of IgA protease of N. gonorrhoeae with the cholera toxin B resulted in the surface presentation of the passenger polypeptide in S. typhymurium. In another study, the signal sequence and the C-terminal beta autotransporter domain of the IgA protease of Neisseria gonorrhoeae was used to translocate and display a scFv directed against a porcine epidemic diarrhea virus epitope on the bacterial cell surface of E. coli (Pyo et al., Vaccine (27) (2009) 2030-2036).

[0551] Thus, in one embodiment, the recombinant bacteria encode an IgA protease fragment in which the alpha domain is substituted with a therapeutic protein of interest, and fused to a functional IgA protease beta-domain, which mediates export through the outer membrane. Without wishing to be bound by theory, IgA protease activity is eliminated in such a fusion protein, and therefore the autoproteoulytic release of the fusion protein into the medium does not occur, resulting in the display of the therapeutic protein of interest on the cell surface of the gram-negative host bacterium.

[0552] The secretion of VirG protein from Shigella is similar to the export system utilized by the IgA protease of Neisseria (Suzuki et al., 1995; J Biol. Chem 270:30874-30880, and references therein). Thus, in some embodiments, the recombinant bacteria encode a fusion protein comprising a therapeutic protein of interest fused to the membrane spanning region of VirG, resulting in surface display of the therapeutic protein of interest. The VirG gene on the large plasmid of Shigella has been shown to be responsible for the localized deposition of filamentous actin (F-actin) trailing from one pole of invading bacterial cells and extending in a filament through the host epithelial cytoplasm. VirG is a surface-exposed outer membrane protein consisting of three distinctive domains, the N-terminal signal sequence (amino acids 1-52), the id α-domain (amino acids 53-758), and the dC-terminal β-core (amino acids 759-1102). Suzuki et al. (1995) showed that the fusion of a foreign protein such as MalE or PhoA protein to the N terminus 37-kDa VirG portion resulted in the transport of the passenger polypeptides from the periplasm to the external side of the outer membrane, indicating that the C-terminal 37-kDa VirG portion embedded in the outer membrane is involved in the translocation of the preceding VirG portion or the heterologous or passenger polypeptide from the periplasmic space to the external side of the outer membrane, in a manner homologous to the IgA protease beta-domain. In some embodiments, the recombinant bacteria comprise one or more gene(s) or gene cassette(s) encoding a fusion protein, in which a C-terminal 37-kDa VirG protein fragment is fused to a therapeutic protein of interest.

[0553] In some embodiments, the recombinant bacteria comprise one or more gene(s) or gene cassette(s) encoding a fusion protein, in which a therapeutic protein of interest is fused to pullulanase for temporary surface display. Pullulanase is specifically released into the medium by Klebsiella pneumonieae, and exists as a fully exposed, cell surface-bound intermediate before it is released into the medium from early stationary growth phase onwards. Cell-surface anchoring is accomplished by an N-terminal fatty acyl modification whose chemical composition is identical to that of other bacterial protein.

[0554] Unlike the IgA protease, the lipoprotein pullulanase (PulA) of Klebsiella pneumoniae, which is also exported via a type II secretion mechanism, requires 14 genes for its translocation across the outer membrane. For example, Pugsley and coworkers have shown that the lipoprotein pullulanase (PulA) can facilitate translocation of the periplasmic enzyme beta-lactamase across the outer membrane. In particular, in E. coli strains expressing all pullulanase secretion genes, pullulanase-beta-lactamase hybrid protein molecules containing an N-terminal 834-amino-acid pullulanase segment were efficiently transported to the cell surface. Of note, pullulanase hybrids remain only temporarily attached to the bacterial surface and are subsequently released into the medium (Kornacker and Pugsley, Mol. Microbiol. 4:1101-1109, and references therein). Accordingly, in some embodiments, the recombinant bacteria comprise one or more gene sequence(s) comprising a complete set of pullulanase genes required for secretion and fusion protein comprising a therapeutic protein of interest fused to a N-terminal pullulanase polypeptide fragment, e.g., as described by Kornacker and Pugsley. In some embodiments, the fusion proteins comprising N-terminal pullulanase polypeptide fused to the therapeutic protein of interest, are transiently displayed on the surface of the bacterial cell, and subsequently released into the media or extracellular space.

[0555] In one embodiment, the recombinant bacteria comprise one or more gene(s) or gene cassette(s) encoding a fusion protein in which the ice nucleation protein (INP) from Pseudomonas syringae anchors a therapeutic protein of interest in the cell wall. INP is a secretory protein that catalyzes extracellular ice formation as the ice nuclei. INP has been found in a number of Gram-negative species, including P. syringae, Erwinia herbicola, Xanthomonas campestris, and Pseudomonas fluorescens. Four genes in P. syringae strains, inaK, inaV, and inaZ, and inaQ exhibit high similarities in sequences and in primary organization (Li et al., Int J Biol Sci. 2012; 8(8): 1097-1108). All INPs (1200 aa to 1500 aa) comprise of three distinct structural domains: (1) the N-terminal domain (approximately 15% of the total sequence), which is relatively hydrophobic and which is are potentially capable of being coupled to the mannan-phosphatidylinositol group in the outer membrane through N-glycan (Asp) or O-glycan (Ser, Thr) linkages; (2) the C-terminal domain (approximately 4%), which is a relatively hydrophilic terminus; and (3) the central repeating domain (CRD) (approximately 81%), which constitutes contiguous repeats given by 16-residue (or 48-residue) periodicities with a consensus octapeptide (Ala-Gly-Tyr-Gly-Ser-Thr-Leu-Thr (SEQ ID NO: 1130)). INPs have been employed in various bacterial cell-surface display systems including E. coli, Zymomonas mobilis, Salmonellas sp., Vibrio anguillarum, Pseudomonas putida, and cyanobacteria, in all of which INPs were able to target a heterologous protein onto the surface of the host cell. Moreover, the N-terminal region alone was shown to direct translocation of foreign proteins to the cell surface and can be employed as a potential cell surface display motif (Li et al., Biotechnol Bioeng. 2004; 85(2):214-21). Accordingly, in some embodiments, the recombinant bacteria comprise IMP fusions for surface display of a therapeutic peptide of interest. In some embodiments, the N-terminal region of the INP protein is fused to the polypeptide of interest for surface display.

[0556] INP proteins further have modifiable internal repeating units, i.e., CRD length is adjustable, which is allows flexibility in protein fusion length (Jung et al., 1998), and also can accommodate larger polypeptides. For example, the INP-based display systems were used to successfully express a 90 kDA protein on the cell surface of E. coli (Wu et al., 2006; FEMS Microbiology Letters, Volume 256, Issue 1; Pages 119-125).

[0557] It is understood by those skilled in the art that translocation of such fusion or hybrid proteins described herein requires a “translocation-competent” conformation, e.g., the formation of disulfide bonds, e.g., in the periplasmic space, may be undesirable and inhibit translocation through the outer membrane (see, e.g., Klauser et al., 1990), or alternatively may be required for, (or at least not impede) translocation through the outer membrane (see, e.g., Puggsley, 1992; Proc Natl Acad Sci USA.; 89(24): 12058-12062). In some embodiments, the recombinant bacteria comprise one or more gene sequence(s) encoding for a fusion protein in which disulfide bonds are prevented from forming prior to the translocation to the cell surface. In some embodiments, the recombinant bacteria comprise one or more gene(s) or gene cassette(s) encoding for a fusion protein in which disulfide bonds are formed prior to translocation to the cell surface.

[0558] Expression systems for the display of proteins in Gram-positive bacteria have also been developed. Consequently, in some embodiments, gram positive bacteria are engineered to display therapeutic proteins of interest on their cell surface. Uhlen et al. used fusions to the cell-wall bound, X-domain of protein A, for the display of foreign peptides up to 88 amino acids long to the surface of Staphylococcus strains. For example one study describes an expression system to allow targeting of heterologous proteins to the cell surface of Staphylococcus xylosus, a coagulase-negative gram-positive bacterium (Hansson et al., J Bacteriol. 1992 July; 174(13):4239-45).

[0559] The expression of recombinant gene fragments, fused between gene fragments encoding the signal peptide and the cell surface-binding regions of staphylococcal protein A, targets the resulting fusion proteins to the outer bacterial cell surface via the membrane-anchoring region and the highly charged cell wall-spanning region of staphylococcal protein A. Accordingly, in some embodiments, the recombinant bacteria comprise one or more gene sequences encoding a therapeutic polypeptide fused between gene fragments encoding the signal peptide and the cell surface-binding regions of staphylococcal protein A.

[0560] E. coli-staphylococcus shuttle vectors have been constructed by taking advantage of the promoter, signal sequence, and propeptide region from the lipase gene construct derived from S. hyicus and the cell surface attachment part of staphylococcal protein A. This system has been investigated for the surface display of heterologous polypeptides on S. carnosus (Samuelson et al., J Bacteriol. 1995; 177(6):1470-6). In some embodiments, the recombinant bacteria comprise one or more gene sequence(s) encoding a therapeutic polypeptide fusion protein comprising promoter, signal sequence, and propeptide region from the lipase gene construct derived from S. hyicus and the cell surface attachment part of staphylococcal protein A.

[0561] In other studies, the fibrillary M6 proteins of Streptococcus pyrogenes was employed as a carrier for antigen delivery in Streptococcus cells. (Pozzi et al., 1992; Infect. Immunm. 60: 1902-1907). In some embodiments, the recombinant bacteria comprise one or more gene sequence(s) comprising therapeutic polypeptide fusion proteins comprising the fibrillary M6 proteins of Streptococcus pyrogenes for cell surface display of the therapeutic polypeptide.

[0562] In some embodiments, the recombinant bacteria comprise one or more gene(s) or gene cassette(s) encoding a polypeptide of interest which is displayed on the cell surface through a fusion with an intimin or invasin. Intimins and invasins belong to a family of bacterial adhesins which specifically interact with various eukaryotic cell surface receptors, thereby mediating bacterial adherence and invasion. Both intimins and invasins provide a structural scaffold ideally suited to the cell surface display.

[0563] In some embodiments, the recombinant bacteria comprise one or more gene(s) or gene cassette(s) encoding a polypeptide of interest which is displayed on the cell surface through a fusion with an intimin, e.g., with the Enterohemorragic E. coli Intimin EaeA protein or a carboxy-terminal truncation thereof (e.g., as described in Wentzel et al, Intimin EaeA J Bacteriol. 2001; 183(24): 7273-7284). For example, N-terminal 489 amino acids of invasin are sufficient to promote the localization of a fusion protein to the cell surface.

[0564] In some embodiments, the recombinant bacteria comprise one or more gene(s) or gene cassette(s) encoding a polypeptide of interest which is displayed on the cell surface through a fusion with an invasin, e.g. Enterohemorrhagic E. coli invasion, or a carboxyterminal truncation thereof. For example, N-terminal 539 amino acids of intimin were sufficient to promote outer membrane localization of a fusion protein (Liu et al., Mol Microbiol. 1999; 34(1):67-81).

[0565] In some embodiments, the recombinant bacteria comprise one or more gene(s) or gene cassette(s) encoding a polypeptide of interest which is displayed on the cell surface through a fusion with Bacillus anthracis exosporal protein (BclA) as an anchoring motif. The BclA is an exosporium protein, a hair-like protein surrounding the B. anthracis spore. In a nonlimiting example, a polypeptide of interest is linked to the C-terminus of N-terminal domain (21 amino acids) of BclA, e.g., as described in Park et al..

[0566] Various other anchoring motifs have been developed including OprF, OmpC, and OmpX, In some embodiments, the recombinant bacteria comprise one or more gene(s) or gene cassette(s) encoding a polypeptide of interest which is displayed on the cell surface through a fusion with OprF, OmpC, and OmpX.

[0567] In some embodiments, the therapeutic polypeptides of interest are permanently displayed on the cell surface of the recombinant bacterium. In some embodiments, the therapeutic polypeptides of interest are transiently displayed on the cell surface of the recombinant bacterium.

[0568] In some embodiments, the therapeutic polypeptides are displayed in strains, e.g., described herein which display a leaky phenotype. Such strains have deactivating mutations in one or more of genes encoding a protein that tethers the outer membrane to the peptidoglycan skeleton, e.g., lpp, ompC, ompA, ompF, tolA, tolB, pal, and/or one or more genes encoding a periplasmic protease, e.g., degS, degP, nlpl.

[0569] In some embodiments, one or more ScFvs are displayed on the bacterial cell surface, alone or in combination with other therapeutic polypeptides of interest.

[0570] In some embodiments, a cell surface display strategy or circuit is combined with a secretion strategy or circuit in one bacterium. In some embodiments, the same polypeptide is both displayed and secreted. In some embodiments, a first polypeptide is displayed and a second is secreted. In some embodiments, a display strategy or circuit strategy is combined with a circuit for the intracellular production of an enzyme and consequentially intracellular catabolism of its substrate. In some embodiments, a display strategy or display circuit is combined with a circuit for the intracellular production of a secreted effector molecule described herein.

[0571] In some embodiments, the expression of the surface displayed polypeptide or fusion protein is driven by an inducible promoter. In some embodiments, the inducible promoter is an oxygen level-dependent promoter (e.g., FNR-inducible promoter). In some embodiments, the inducible promoter is induced by gut-specific and/or tumor-specific or promoters induced by inflammation or an inflammatory response (RNS, ROS promoters), or promoters induced by a metabolite that may or may not be naturally present (e.g., can be exogenously added) in the gut, e.g., arabinose. In alternate embodiments, expression of the surface displayed polypeptides or polypeptide fusion proteins is driven by a constitutive promoter.

[0572] In some embodiments, the expression of the surface displayed polypeptide or fusion protein is plasmid based. In some embodiments, the gene sequence(s) encoding the antibodies or scFv fragments for surface display is chromosomally inserted.

[0573] Essential Genes and Auxotrophs

[0574] As used herein, the term “essential gene” refers to a gene which is necessary to for cell growth and/or survival. Bacterial essential genes are well known to one of ordinary skill in the art, and can be identified by directed deletion of genes and/or random mutagenesis and screening (see, e.g., Zhang, 2009, Nucl. Acids Res., 37:D455-D458 and Gerdes et al., Curr. Opin. Biotechnol., 17(5):448-456, the entire contents of each reference are incorporated herein by reference).

[0575] An “essential gene” may be dependent on the circumstances and environment in which an organism lives. For example, a mutation of, modification of, or excision of an essential gene may result in the recombinant bacteria of the disclosure becoming an auxotroph. An auxotrophic modification is intended to cause bacteria to die in the absence of an exogenously added nutrient essential for survival or growth because they lack the gene(s) necessary to produce that essential nutrient.

[0576] An auxotrophic modification is intended to cause bacteria to die in the absence of an exogenously added nutrient essential for survival or growth because they lack the gene(s) necessary to produce that essential nutrient. In some embodiments, any of the recombinant bacteria described herein also comprise a deletion or mutation in a gene required for cell survival and/or growth. In one embodiment, the essential gene is a DNA synthesis gene, for example, thyA. In another embodiment, the essential gene is a cell wall synthesis gene, for example, dapA. In yet another embodiment, the essential gene is an amino acid gene, for example, serA or MetA. Any gene required for cell survival and/or growth may be targeted, including but not limited to, cysE, glnA, ilvD, leuB, lysA, serA, metA, glyA, hisB, ilvA, pheA, proA, thrC, trpC, tyrA, thyA, uraA, dapA, dapB, dapD, dapE, dapF, flhD, metB, metC, proAB, and thi1, as long as the corresponding wild-type gene product is not produced in the bacteria.

[0577] Table 15 lists exemplary bacterial genes which may be disrupted or deleted to produce an auxotrophic strain. These include, but are not limited to, genes required for oligonucleotide synthesis, amino acid synthesis, and cell wall synthesis.

TABLE 15
Non-limiting Examples of Bacterial Genes
Useful for Generation of an Auxotroph

| Amino Acid | Oligonucleotide | Cell Wall |
|---|---|---|
| cysE | thyA | dapA |
| glnA | uraA | dapB |
| ilvD | | dapD |
| leuB | | dapE |
| lysA | | dapF |
| serA | | |
| metA | | |
| glyA | | |
| hisB | | |
| ilvA | | |
| pheA | | |
| proA | | |
| thrC | | |
| trpC | | |
| tyrA | | |

[0578] Table 16 shows the survival of various amino acid auxotrophs in the mouse gut, as detected 24 hrs and 48 hrs post-gavage. These auxotrophs were generated using BW25113, a non-Nissle strain of E. coli.

TABLE 16
Survival of amino acid auxotrophs in the mouse gut

| Gene | AA Auxotroph | Pre-Gavage | 24 hours | 48 hours |
|---|---|---|---|---|
| argA | Arginine | Present | Present | Absent |
| cysE | Cysteine | Present | Present | Absent |
| glnA | Glutamine | Present | Present | Absent |
| glyA | Glycine | Present | Present | Absent |
| hisB | Histidine | Present | Present | Present |
| ilvA | Isoleucine | Present | Present | Absent |
| leuB | Leucine | Present | Present | Absent |
| lysA | Lysine | Present | Present | Absent |
| metA | Methionine | Present | Present | Present |
| pheA | Phenylalanine | Present | Present | Present |
| proA | Proline | Present | Present | Absent |
| serA | Serine | Present | Present | Present |
| thrC | Threonine | Present | Present | Present |
| trpC | Tryptophan | Present | Present | Present |
| tyrA | Tyrosine | Present | Present | Present |
| ilvD | Valine/Isoleucine/ | Present | Present | Absent |
| | Leucine | | | |
| thyA | Thiamine | Present | Absent | Absent |
| uraA | Uracil | Present | Absent | Absent |
| flhD | FlhD | Present | Present | Present |

[0579] For example, thymine is a nucleic acid that is required for bacterial cell growth; in its absence, bacteria undergo cell death. The thyA gene encodes thimidylate synthetase, an enzyme that catalyzes the first step in thymine synthesis by converting dUMP to dTMP (Sat et al., 2003). In some embodiments, the bacterial cell of the disclosure is a thyA auxotroph in which the thyA gene is deleted and/or replaced with an unrelated gene. A thyA auxotroph can grow only when sufficient amounts of thymine are present, e.g., by adding thymine to growth media in vitro, or in the presence of high thymine levels found naturally in the human gut in vivo. In some embodiments, the bacterial cell of the disclosure is auxotrophic in a gene that is complemented when the bacterium is present in the mammalian gut. Without sufficient amounts of thymine, the thyA auxotroph dies. In some embodiments, the auxotrophic modification is used to ensure that the bacterial cell does not survive in the absence of the auxotrophic gene product (e.g., outside of the gut).

[0580] Diaminopimelic acid (DAP) is an amino acid synthetized within the lysine biosynthetic pathway and is required for bacterial cell wall growth (Meadow et al., 1959; Clarkson et al., 1971). In some embodiments, any of the recombinant bacteria described herein is a dapD auxotroph in which dapD is deleted and/or replaced with an unrelated gene. A dapD auxotroph can grow only when sufficient amounts of DAP are present, e.g., by adding DAP to growth media in vitro. Without sufficient amounts of DAP, the dapD auxotroph dies. In some embodiments, the auxotrophic modification is used to ensure that the bacterial cell does not survive in the absence of the auxotrophic gene product (e.g., outside of the gut).

[0581] In other embodiments, the recombinant bacterium of the present disclosure is a uraA auxotroph in which uraA is deleted and/or replaced with an unrelated gene. The uraA gene codes for UraA, a membrane-bound transporter that facilitates the uptake and subsequent metabolism of the pyrimidine uracil (Andersen et al., 1995). A uraA auxotroph can grow only when sufficient amounts of uracil are present, e.g., by adding uracil to growth media in vitro. Without sufficient amounts of uracil, the uraA auxotroph dies. In some embodiments, auxotrophic modifications are used to ensure that the bacteria do not survive in the absence of the auxotrophic gene product (e.g., outside of the gut).

[0582] In complex communities, it is possible for bacteria to share DNA. In very rare circumstances, an auxotrophic bacterial strain may receive DNA from a non-auxotrophic strain, which repairs the genomic deletion and permanently rescues the auxotroph. Therefore, engineering a bacterial strain with more than one auxotroph may greatly decrease the probability that DNA transfer will occur enough times to rescue the auxotrophy. In some embodiments, the recombinant bacteria comprise a deletion or mutation in two or more genes required for cell survival and/or growth.

[0583] Other examples of essential genes include, but are not limited to yhbV, yagG, hemB, secD, secF, ribD, ribE, thiL, dxs, ispA, dnaX, adk, hemH, lpxH, cysS, fold, rplT, infC, thrS, nadE, gapA, yeaZ, aspS, argS, pgsA, yefM, metG, folE, yejM, gyrA, nrdA, nrdB, folC, accD, fabB, gltX, ligA, zipA, dapE, dapA, der, hisS, ispG, suhB, tadA, acpS, era, mc, ftsB, eno, pyrG, chpR, lgt, fbaA, pgk, yqgD, metK, yqgF, plsC, ygiT, pare, ribB, cca, ygjD, tdcF, yraL, yihA, ftsN, murl, murB, birA, secE, nusG, rplJ, rplL, rpoB, rpoC, ubiA, plsB, lexA, dnaB, ssb, alsK, groS, psd, orn, yjeE, rpsR, chpS, ppa, valS, yjgP, yjgQ, dnaC, ribF, lspA, ispH, dapB, folA, imp, yabQ, ftsL, ftsI, murE, murF, mraY, murD, ftsW, murG, murC, ftsQ, ftsA, ftsZ, lpxC, secM, secA, can, folK, hemL, yadR, dapD, map, rpsB, infB, nusA, ftsH, obgE, rpmA, rplU, ispB, murA, yrbB, yrbK, yhbN, rpsI, rplM, degS, mreD, mreC, mreB, accB, accC, yrdC, def, fmt, rplQ, rpoA, rpsD, rpsK, rpsM, entD, mrdB, mrdA, nadD, hlepB, rpoE, pssA, yfiO, rplS, trmD, rpsP, ffh, grpE, yfjB, csrA, ispF, ispD, rplW, rplD, rplC, rpsJ, fusA, rpsG, rpsL, trpS, yrfF, asd, rpoH, ftsX, ftsE, ftsY, frr, dxr, ispU, rfaK, kdtA, coaD, rpmB, dfp, dut, gmk, spot, gyrB, dnaN, dnaA, rpmH, rnpA, yidC, tnaB, glmS, glmU, wzyE, hemD, hemC, yigP, ubiB, ubiD, hemG, secY, rplO, rpmD, rpsE, rplR, rplF, rpsH, rpsN, rplE, rplX, rplN, rpsQ, rpmC, rplP, rpsC, rplV, rpsS, rplB, cdsA, yaeL, yaeT, lpxD, fabZ, lpxA, lpxB, dnaE, accA, tilS, proS, yafF, tsf, pyrH, olA, rlpB, leuS, lnt, glnS, fldA, cydA, infA, cydC, ftsK, lolA, serS, rpsA, msbA, lpxK, kdsB, mukF, mukE, mukB, asnS, fabA, mviN, me, yceQ, fabD, fabG, acpP, tmk, holB, lolC, lolD, lolE, purB, ymfK, minE, mind, pth, rsA, ispE, lolB, hemA, prfA, prmC, kdsA, topA, ribA, fabl, racR, dicA, ydfB, tyrS, ribC, ydiL, pheT, pheS, yhhQ, bcsB, glyQ, yibJ, and gpsA. Other essential genes are known to those of ordinary skill in the art.

[0584] In some embodiments, the recombinant bacterium of the present disclosure is a synthetic ligand-dependent essential gene (SLiDE) bacterial cell. SLiDE bacterial cells are synthetic auxotrophs with a mutation in one or more essential genes that only grow in the presence of a particular ligand (see Lopez and Anderson, ACS Synthetic Biology (2015), the entire contents of which are expressly incorporated herein by reference).

[0585] In some embodiments, the SLiDE bacterial cell comprises a mutation in an essential gene. In some embodiments, the essential gene is selected from the group consisting of pheS, dnaN, tyrS, metG, and adk. In some embodiments, the essential gene is dnaN comprising one or more of the following mutations: H191N, R240C, 1317S, F319V, L340T, V347I, and S345C. In some embodiments, the essential gene is dnaN comprising the mutations H191N, R240C, I317S, F319V, L340T, V347I, and S345C. In some embodiments, the essential gene is pheS comprising one or more of the following mutations: F125G, P183T, P184A, R186A, and I188L. In some embodiments, the essential gene is pheS comprising the mutations F125G, P183T, P184A, R186A, and I188L. In some embodiments, the essential gene is tyrS comprising one or more of the following mutations: L36V, C38A and F40G. In some embodiments, the essential gene is tyrS comprising the mutations L36V, C38A and F40G. In some embodiments, the essential gene is metG comprising one or more of the following mutations: E45Q, N47R, I49G, and A51C. In some embodiments, the essential gene is metG comprising the mutations E45Q, N47R, I49G, and A51C. In some embodiments, the essential gene is adk comprising one or more of the following mutations: I4L, L5I and L6G. In some embodiments, the essential gene is adk comprising the mutations I4L, L5I and L6G.

[0586] In some embodiments, the recombinant bacterium is complemented by a ligand. In some embodiments, the ligand is selected from the group consisting of benzothiazole, indole, 2-aminobenzothiazole, indole-3-butyric acid, indole-3-acetic acid, and L-histidine methyl ester. For example, bacterial cells comprising mutations in metG (E45Q, N47R, I49G, and A51C) are complemented by benzothiazole, indole, 2-aminobenzothiazole, indole-3-butyric acid, indole-3-acetic acid or L-histidine methyl ester. Bacterial cells comprising mutations in dnaN (H191N, R240C, I317S, F319V, L340T, V347I, and S345C) are complemented by benzothiazole, indole or 2-aminobenzothiazole. Bacterial cells comprising mutations in pheS (F125G, P183T, P184A, R186A, and I188L) are complemented by benzothiazole or 2-aminobenzothiazole. Bacterial cells comprising mutations in tyrS (L36V, C38A, and F40G) are complemented by benzothiazole or 2-aminobenzothiazole. Bacterial cells comprising mutations in adk (I4L, L5I and L6G) are complemented by benzothiazole or indole.

[0587] In some embodiments, the recombinant bacterium comprises more than one mutant essential gene that renders it auxotrophic to a ligand. In some embodiments, the bacterial cell comprises mutations in two essential genes. For example, in some embodiments, the bacterial cell comprises mutations in tyrS (L36V, C38A, and F40G) and metG (E45Q, N47R, I49G, and A51C). In other embodiments, the bacterial cell comprises mutations in three essential genes. For example, in some embodiments, the bacterial cell comprises mutations in tyrS (L36V, C38A, and F40G), metG (E45Q, N47R, I49G, and A51C), and pheS (F125G, P183T, P184A, R186A, and I188L).

[0588] In some embodiments, the recombinant bacterium is a conditional auxotroph, wherein the expression of a heterologous gene is activated by an exogenous environmental signal. In some embodiments, the recombinant bacterium is a conditional auxotroph whose essential gene(s) is replaced using an arabinose system. In the absence of arabinose, the AraC transcription factor adopts a conformation that represses transcription of the essential gene under the control of the araBAD promoter and the bacterial cell cannot survive. In the presence of arabinose, the AraC transcription factor undergoes a conformational change that allows it to bind to and activate the araBAD promoter, which induces expression of the essential gene and maintains viability of the bacterial cell.

[0589] In some embodiments, the recombinant bacterium of the disclosure is an auxotroph and also comprises kill-switch circuitry, such as any of the kill-switch components and systems described herein. For example, the recombinant bacteria may comprise a deletion or mutation in an essential gene required for cell survival and/or growth, for example, in a DNA synthesis gene, for example, thyA, cell wall synthesis gene, for example, dapA and/or an amino acid gene, for example, serA or MetA and may also comprise a toxin gene that is regulated by one or more transcriptional activators that are expressed in response to an environmental condition(s) and/or signal(s) (such as the described arabinose system) or regulated by one or more recombinases that are expressed upon sensing an exogenous environmental condition(s) and/or signal(s) (such as the recombinase systems described herein). Other embodiments are described in Wright et al., ACS Synthetic Biology (2015) 4: 307-16, the entire contents of which are expressly incorporated herein by reference. In some embodiments, the recombinant bacterium of the disclosure is an auxotroph and also comprises kill-switch circuitry, such as any of the kill-switch components and systems described herein, as well as another biosecurity system, such a conditional origin of replication (Wright et al., 2015). In other embodiments, auxotrophic modifications may also be used to screen for mutant bacteria that produce the effector molecule.

[0590] Antibiotic Resistance

[0591] In some embodiments, the recombinant bacteria comprise one or more genes providing resistance to antibiotics. As used herein, “Antibiotics” are substances that kill bacteria (bactericidal), or inhibit bacterial growth (bacteriostatic). Antibiotics may be natural products, many common antibiotics used in labs today are semi-synthetic or fully synthetic compounds. An antibiotic resistance gene can be added to a bacterium of interest, either on a plasmid or integrated into the chromosome in conjunction with the gene of interest, allowing the simple detection of bacteria containing the gene of interest by growing the bacteria on selective media containing the antibiotic.

[0592] In some embodiments, the recombinant bacteria comprise one or more genes providing resistance to aminoglycosides. In some embodiments, the recombinant bacteria comprise one or more genes providing resistance to a beta-lactam. In some embodiments, the recombinant bacteria comprise one or more genes providing resistance to glycopeptides. In some embodiments, the recombinant bacteria comprise one or more genes providing resistance to macrolides. In some embodiments, the recombinant bacteria comprise one or more genes providing resistance to polypeptide antibiotics. In some embodiments, the recombinant bacteria comprise one or more genes providing resistance to a tetracyclin.

[0593] In some embodiments, the recombinant bacteria comprise one or more genes providing resistance to Kanamycin. In some embodiments, the recombinant bacteria comprise one or more genes providing resistance to Spectinomycin. In some embodiments, the recombinant bacteria comprise one or more genes providing resistance to Streptomycin. In some embodiments, the recombinant bacteria comprise one or more genes providing resistance to Ampicillin. In some embodiments, the recombinant bacteria comprise one or more genes providing resistance to Carbenicillin. In some embodiments, the recombinant bacteria comprise one or more genes providing resistance to Bleomycin. In some embodiments, the recombinant bacteria comprise one or more genes providing resistance to Erythromycin. In some embodiments, the recombinant bacteria comprise one or more genes providing resistance to Polymyxin B. In some embodiments, the recombinant bacteria comprise one or more genes providing resistance to Tetracycline. In some embodiments, the recombinant bacteria comprise one or more genes providing resistance to Chloramphenicol.

[0594] Genetic Regulatory Circuits

[0595] In some embodiments, the recombinant bacteria comprise multi-layered genetic regulatory circuits for expressing the constructs described herein (see, e.g., U.S. Provisional Application No. 62/184,811 and PCT/US2016/39434, both of which are incorporated herein by reference in their entireties). The genetic regulatory circuits are useful to screen for mutant bacteria that produce an effector molecule or rescue an auxotroph. In certain embodiments, the invention provides methods for selecting recombinant bacteria that produce one or more genes of interest.

[0596] In some embodiments, the invention provides recombinant bacteria comprising a gene or gene cassette for producing a therapeutic molecule (e.g., butyrate) and a T7 polymerase-regulated genetic regulatory circuit. For example, the recombinant bacteria comprise a first gene encoding a T7 polymerase, wherein the first gene is operably linked to a FNR-responsive promoter; a second gene or gene cassette for producing a therapeutic molecule (e.g., butyrate), wherein the second gene or gene cassette is operably linked to a T7 promoter that is induced by the T7 polymerase; and a third gene encoding an inhibitory factor, lysY, that is capable of inhibiting the T7 polymerase. In the presence of oxygen, FNR does not bind the FNR-responsive promoter, and the therapeutic molecule (e.g., butyrate) is not expressed. LysY is expressed constitutively (P-lac constitutive) and further inhibits T7 polymerase. In the absence of oxygen, FNR dimerizes and binds to the FNR-responsive promoter, T7 polymerase is expressed at a level sufficient to overcome lysY inhibition, and the therapeutic molecule (e.g., butyrate) is expressed. In some embodiments, the lysY gene is operably linked to an additional FNR binding site. In the absence of oxygen, FNR dimerizes to activate T7 polymerase expression as described above, and also inhibits lysY expression.

[0597] In some embodiments, the invention provides recombinant bacteria comprising a gene or gene cassette for producing a therapeutic molecule (e.g., butyrate) and a protease-regulated genetic regulatory circuit. For example, the recombinant bacteria comprise a first gene encoding an mf-lon protease, wherein the first gene is operably linked to a FNR-responsive promoter; a second gene or gene cassette for producing a therapeutic molecule operably linked to a Tet regulatory region (TetO); and a third gene encoding an mf-lon degradation signal linked to a Tet repressor (TetR), wherein the TetR is capable of binding to the Tet regulatory region and repressing expression of the second gene or gene cassette. The mf-lon protease is capable of recognizing the mf-lon degradation signal and degrading the TetR. In the presence of oxygen, FNR does not bind the FNR-responsive promoter, the repressor is not degraded, and the therapeutic molecule is not expressed. In the absence of oxygen, FNR dimerizes and binds the FNR-responsive promoter, thereby inducing expression of the mf-lon protease. The mf-lon protease recognizes the mf-lon degradation signal and degrades the TetR, and the therapeutic molecule is expressed.

[0598] In some embodiments, the invention provides recombinant bacteria comprising a gene or gene cassette for producing a therapeutic molecule and a repressor-regulated genetic regulatory circuit. For example, the recombinant bacteria comprise a first gene encoding a first repressor, wherein the first gene is operably linked to a FNR-responsive promoter; a second gene or gene cassette for producing a therapeutic molecule operably linked to a first regulatory region comprising a constitutive promoter; and a third gene encoding a second repressor, wherein the second repressor is capable of binding to the first regulatory region and repressing expression of the second gene or gene cassette. The third gene is operably linked to a second regulatory region comprising a constitutive promoter, wherein the first repressor is capable of binding to the second regulatory region and inhibiting expression of the second repressor. In the presence of oxygen, FNR does not bind the FNR-responsive promoter, the first repressor is not expressed, the second repressor is expressed, and the therapeutic molecule is not expressed. In the absence of oxygen, FNR dimerizes and binds the FNR-responsive promoter, the first repressor is expressed, the second repressor is not expressed, and the therapeutic molecule is expressed.

[0599] Examples of repressors useful in these embodiments include, but are not limited to, ArgR, TetR, ArsR, AscG, Lad, CscR, DeoR, DgoR, FruR, GalR, GatR, CI, LexA, RafR, QacR, and PtxS (US20030166191).

[0600] In some embodiments, the invention provides recombinant bacteria comprising a gene or gene cassette for producing a therapeutic molecule and a regulatory RNA-regulated genetic regulatory circuit. For example, the recombinant bacteria comprise a first gene encoding a regulatory RNA, wherein the first gene is operably linked to a FNR-responsive promoter, and a second gene or gene cassette for producing a therapeutic molecule. The second gene or gene cassette is operably linked to a constitutive promoter and further linked to a nucleotide sequence capable of producing an mRNA hairpin that inhibits translation of the therapeutic molecule. The regulatory RNA is capable of eliminating the mRNA hairpin and inducing translation via the ribosomal binding site. In the presence of oxygen, FNR does not bind the FNR-responsive promoter, the regulatory RNA is not expressed, and the mRNA hairpin prevents the therapeutic molecule from being translated. In the absence of oxygen, FNR dimerizes and binds the FNR-responsive promoter, the regulatory RNA is expressed, the mRNA hairpin is eliminated, and the therapeutic molecule is expressed.

[0601] In some embodiments, the invention provides recombinant bacteria comprising a gene or gene cassette for producing a therapeutic molecule and a CRISPR-regulated genetic regulatory circuit. For example, the recombinant bacteria comprise a Cas9 protein; a first gene encoding a CRISPR guide RNA, wherein the first gene is operably linked to a FNR-responsive promoter; a second gene or gene cassette for producing a therapeutic molecule, wherein the second gene or gene cassette is operably linked to a regulatory region comprising a constitutive promoter; and a third gene encoding a repressor operably linked to a constitutive promoter, wherein the repressor is capable of binding to the regulatory region and repressing expression of the second gene or gene cassette. The third gene is further linked to a CRISPR target sequence that is capable of binding to the CRISPR guide RNA, wherein said binding to the CRISPR guide RNA induces cleavage by the Cas9 protein and inhibits expression of the repressor. In the presence of oxygen, FNR does not bind the FNR-responsive promoter, the guide RNA is not expressed, the repressor is expressed, and the therapeutic molecule is not expressed. In the absence of oxygen, FNR dimerizes and binds the FNR-responsive promoter, the guide RNA is expressed, the repressor is not expressed, and the therapeutic molecule is expressed.

[0602] In some embodiments, the invention provides recombinant bacteria comprising a gene or gene cassette for producing a therapeutic molecule and a recombinase-regulated genetic regulatory circuit. For example, the recombinant bacteria comprise a first gene encoding a recombinase, wherein the first gene is operably linked to a FNR-responsive promoter, and a second gene or gene cassette for producing a therapeutic molecule operably linked to a constitutive promoter. The second gene or gene cassette is inverted in orientation (3′ to 5′) and flanked by recombinase binding sites, and the recombinase is capable of binding to the recombinase binding sites to induce expression of the second gene or gene cassette by reverting its orientation (5′ to 3′). In the presence of oxygen, FNR does not bind the FNR-responsive promoter, the recombinase is not expressed, the gene or gene cassette remains in the 3′ to 5′ orientation, and no functional therapeutic molecule is produced. In the absence of oxygen, FNR dimerizes and binds the FNR-responsive promoter, the recombinase is expressed, the gene or gene cassette is reverted to the 5′ to 3′ orientation, and a functional therapeutic molecule is produced.

[0603] In some embodiments, the invention provides recombinant bacteria comprising a gene or gene cassette for producing a therapeutic molecule and a polymerase- and recombinase-regulated genetic regulatory circuit. For example, the recombinant bacteria comprise a first gene encoding a recombinase, wherein the first gene is operably linked to a FNR-responsive promoter; a second gene or gene cassette for producing a therapeutic molecule operably linked to a T7 promoter; a third gene encoding a T7 polymerase, wherein the T7 polymerase is capable of binding to the T7 promoter and inducing expression of the therapeutic molecule. The third gene encoding the T7 polymerase is inverted in orientation (3′ to 5′) and flanked by recombinase binding sites, and the recombinase is capable of binding to the recombinase binding sites to induce expression of the T7 polymerase gene by reverting its orientation (5′ to 3′). In the presence of oxygen, FNR does not bind the FNR-responsive promoter, the recombinase is not expressed, the T7 polymerase gene remains in the 3′ to 5′ orientation, and the therapeutic molecule is not expressed. In the absence of oxygen, FNR dimerizes and binds the FNR-responsive promoter, the recombinase is expressed, the T7 polymerase gene is reverted to the 5′ to 3′ orientation, and the therapeutic molecule is expressed.

[0604] Synthetic gene circuits expressed on plasmids may function well in the short term but lose ability and/or function in the long term (Danino et al., 2015). In some embodiments, the recombinant bacteria comprise stable circuits for expressing genes of interest over prolonged periods. In some embodiments, the recombinant bacteria are capable of producing a therapeutic molecule and further comprise a toxin-anti-toxin system that simultaneously produces a toxin (hok) and a short-lived anti-toxin (sok), wherein loss of the plasmid causes the cell to be killed by the long-lived toxin (Danino et al., 2015). In some embodiments, the recombinant bacteria further comprise alp7 from B. subtilis plasmid pL20 and produces filaments that are capable of pushing plasmids to the poles of the cells in order to ensure equal segregation during cell division (Danino et al., 2015).

[0605] Host-Plasmid Mutual Dependency

[0606] In some embodiments, the recombinant bacteria also comprise a plasmid that has been modified to create a host-plasmid mutual dependency. In certain embodiments, the mutually dependent host-plasmid platform is antibiotic independent plasmid system (AIPS) (Wright et al., 2015). In some embodiments, the AIPS comprises (i) a conditional origin of replication, in which the requisite replication initiator protein is provided in trans; (ii) an auxotrophic modification that is rescued by the host via genomic translocation and is also compatible for use in rich media; and/or (iii) a nucleic acid sequence which encodes a broad-spectrum toxin. The toxin gene may be used to select against plasmid spread by making the plasmid DNA itself disadvantageous for strains not expressing the anti-toxin (e.g., a wild-type bacterium). In some embodiments, the AIPS plasmid is stable for at least 100 generations without antibiotic selection. In some embodiments, the AIPS plasmid does not disrupt growth of the host. The AIPS plasmid is used to greatly reduce unintentional plasmid propagation in the recombinant bacteria.

[0607] The mutually dependent host-plasmid platform may be used alone or in combination with other biosafety mechanisms, such as those described herein (e.g., kill switches, auxotrophies). In some embodiments, the recombinant bacteria comprise a AIPS plasmid. In other embodiments, the recombinant bacteria comprise a AIPS plasmid and/or one or more kill switches. In other embodiments, the recombinant bacteria comprise a AIPS plasmid and/or one or more auxotrophies. In still other embodiments, the recombinant bacteria comprise a AIPS plasmid, one or more kill switches, and/or one or more auxotrophies.

[0608] Synthetic gene circuits express on plasmids may function well in the short term but lose ability and/or function in the long term (Danino et al., 2015). In some embodiments, the recombinant bacteria comprise stable circuits for expressing genes of interest over prolonged periods. In some embodiments, the recombinant bacteria are capable of producing a secreted effector molecule described herein and further comprise a toxin-anti-toxin system that simultaneously produces a toxin (hok) and a short-lived anti-toxin (sok), wherein loss of the plasmid causes the cell to be killed by the long-lived toxin (Danino et al., 2015; as shown in the figures and examples). In some embodiments, the recombinant bacteria further comprise alp7 from B. subtilis plasmid pL20 and produces filaments that are capable of pushing plasmids to the poles of the cells in order to ensure equal segregation during cell division (Danino et al., 2015).

[0609] Kill Switch

[0610] In some embodiments, the recombinant bacteria also comprise a kill switch (see, e.g., U.S. Provisional Application Nos. 62/183,935, 62/263,329, 62/277,654, and International Patent Publication WO2016/210373, the contents of each of which is incorporated herein by reference in their entireties). The kill switch is intended to actively kill recombinant bacteria in response to external stimuli. As opposed to an auxotrophic mutation where bacteria die because they lack an essential nutrient for survival, the kill switch is triggered by a particular factor in the environment that induces the production of toxic molecules within the microbe that cause cell death.

[0611] Bacteria comprising kill switches have been engineered for in vitro research purposes, e.g., to limit the spread of a biofuel-producing microorganism outside of a laboratory environment. Bacteria engineered for in vivo administration to treat a disease may also be programmed to die at a specific time after the expression and delivery of a heterologous gene or genes, for example, an effector molecule, or after the subject has experienced the therapeutic effect. For example, in some embodiments, the kill switch is activated to kill the bacteria after a period of time following expression of the effector molecule, e.g., GLP-2 or others described herein. In some embodiments, the kill switch is activated in a delayed fashion following expression of the effector molecule. Alternatively, the bacteria may be engineered to die after the bacterium has spread outside of a disease site. Specifically, it may be useful to prevent long-term colonization of subjects by the microorganism, spread of the microorganism outside the area of interest (for example, outside the gut or the tumor microenvironment) within the subject, or spread of the microorganism outside of the subject into the environment (for example, spread to the environment through the stool of the subject). Examples of such toxins that can be used in kill-switches include, but are not limited to, bacteriocins, lysins, and other molecules that cause cell death by lysing cell membranes, degrading cellular DNA, or other mechanisms. Such toxins can be used individually or in combination. The switches that control their production can be based on, for example, transcriptional activation (toggle switches; see, e.g., Gardner et al., 2000), translation (riboregulators), or DNA recombination (recombinase-based switches), and can sense environmental stimuli such as anaerobiosis or reactive oxygen species. These switches can be activated by a single environmental factor or may require several activators in AND, OR, NAND and NOR logic configurations to induce cell death. For example, an AND riboregulator switch is activated by tetracycline, isopropyl β-D-1-thiogalactopyranoside (IPTG), and arabinose to induce the expression of lysins, which permeabilize the cell membrane and kill the cell. IPTG induces the expression of the endolysin and holin mRNAs, which are then derepressed by the addition of arabinose and tetracycline. All three inducers must be present to cause cell death. Examples of kill switches are known in the art (Callura et al., 2010).

[0612] Kill-switches can be designed such that a toxin is produced in response to an environmental condition or external signal (e.g., the bacteria is killed in response to an external cue) or, alternatively designed such that a toxin is produced once an environmental condition no longer exists or an external signal is ceased.

[0613] Thus, in some embodiments, the recombinant bacteria of the disclosure are further programmed to die after sensing an exogenous environmental signal, for example, in low-oxygen conditions, in the presence of ROS, or in the presence of RNS. In some embodiments, the recombinant bacteria of the present disclosure comprise one or more genes encoding one or more recombinase(s), whose expression is induced in response to an environmental condition or signal and causes one or more recombination events that ultimately leads to the expression of a toxin which kills the cell. In some embodiments, the at least one recombination event is the flipping of an inverted heterologous gene encoding a bacterial toxin which is then constitutively expressed after it is flipped by the first recombinase. In one embodiment, constitutive expression of the bacterial toxin kills the recombinant bacterium. In these types of kill-switch systems once the engineered bacterial cell senses the exogenous environmental condition and expresses the heterologous gene of interest, the recombinant bacterial cell is no longer viable.

[0614] In another embodiment in which the recombinant bacteria of the present disclosure express one or more recombinase(s) in response to an environmental condition or signal causing at least one recombination event, the recombinant bacterium further expresses a heterologous gene encoding an anti-toxin in response to an exogenous environmental condition or signal. In one embodiment, the at least one recombination event is flipping of an inverted heterologous gene encoding a bacterial toxin by a first recombinase. In one embodiment, the inverted heterologous gene encoding the bacterial toxin is located between a first forward recombinase recognition sequence and a first reverse recombinase recognition sequence. In one embodiment, the heterologous gene encoding the bacterial toxin is constitutively expressed after it is flipped by the first recombinase. In one embodiment, the anti-toxin inhibits the activity of the toxin, thereby delaying death of the recombinant bacterium. In one embodiment, the recombinant bacterium is killed by the bacterial toxin when the heterologous gene encoding the anti-toxin is no longer expressed when the exogenous environmental condition is no longer present.

[0615] In another embodiment, the at least one recombination event is flipping of an inverted heterologous gene encoding a second recombinase by a first recombinase, followed by the flipping of an inverted heterologous gene encoding a bacterial toxin by the second recombinase. In one embodiment, the inverted heterologous gene encoding the second recombinase is located between a first forward recombinase recognition sequence and a first reverse recombinase recognition sequence. In one embodiment, the inverted heterologous gene encoding the bacterial toxin is located between a second forward recombinase recognition sequence and a second reverse recombinase recognition sequence. In one embodiment, the heterologous gene encoding the second recombinase is constitutively expressed after it is flipped by the first recombinase. In one embodiment, the heterologous gene encoding the bacterial toxin is constitutively expressed after it is flipped by the second recombinase. In one embodiment, the recombinant bacterium is killed by the bacterial toxin. In one embodiment, the recombinant bacterium further expresses a heterologous gene encoding an anti-toxin in response to the exogenous environmental condition. In one embodiment, the anti-toxin inhibits the activity of the toxin when the exogenous environmental condition is present, thereby delaying death of the recombinant bacterium. In one embodiment, the recombinant bacterium is killed by the bacterial toxin when the heterologous gene encoding the anti-toxin is no longer expressed when the exogenous environmental condition is no longer present.

[0616] In one embodiment, the at least one recombination event is flipping of an inverted heterologous gene encoding a second recombinase by a first recombinase, followed by flipping of an inverted heterologous gene encoding a third recombinase by the second recombinase, followed by flipping of an inverted heterologous gene encoding a bacterial toxin by the third recombinase.

[0617] In one embodiment, the at least one recombination event is flipping of an inverted heterologous gene encoding a first excision enzyme by a first recombinase. In one embodiment, the inverted heterologous gene encoding the first excision enzyme is located between a first forward recombinase recognition sequence and a first reverse recombinase recognition sequence. In one embodiment, the heterologous gene encoding the first excision enzyme is constitutively expressed after it is flipped by the first recombinase. In one embodiment, the first excision enzyme excises a first essential gene. In one embodiment, the programmed recombinant bacterial cell is not viable after the first essential gene is excised.

[0618] In one embodiment, the first recombinase further flips an inverted heterologous gene encoding a second excision enzyme. In one embodiment, the inverted heterologous gene encoding the second excision enzyme is located between a second forward recombinase recognition sequence and a second reverse recombinase recognition sequence. In one embodiment, the heterologous gene encoding the second excision enzyme is constitutively expressed after it is flipped by the first recombinase. In one embodiment, the recombinant bacterium dies or is no longer viable when the first essential gene and the second essential gene are both excised. In one embodiment, the recombinant bacterium dies or is no longer viable when either the first essential gene is excised or the second essential gene is excised by the first recombinase.

[0619] In one embodiment, the recombinant bacterium dies after the at least one recombination event occurs. In another embodiment, the recombinant bacterium is no longer viable after the at least one recombination event occurs.

[0620] In any of these embodiment, the recombinase can be a recombinase selected from the group consisting of: BxbI, PhiC31, TP901, BxbI, PhiC31, TP901, HK022, HP1, R4, Int1, Int2, Int3, Int4, Int5, Int6, Int7, Int8, Int9, Int10, Int11, Int12, Int13, Int14, Int15, Int16, Int17, Int18, Int19, Int20, Int21, Int22, Int23, Int24, Int25, Int26, Int27, Int28, Int29, Int30, Int31, Int32, Int33, and Int34, or a biologically active fragment thereof.

[0621] In the above-described kill-switch circuits, a toxin is produced in the presence of an environmental factor or signal. In another aspect of kill-switch circuitry, a toxin may be repressed in the presence of an environmental factor (not produced) and then produced once the environmental condition or external signal is no longer present. Such kill switches are called repression-based kill switches and represent systems in which the bacterial cells are viable only in the presence of an external factor or signal, such as arabinose or other sugar. The disclosure provides recombinant bacterial cells which express one or more heterologous gene(s) upon sensing arabinose or other sugar in the exogenous environment. In this aspect, the recombinant bacterial cells contain the araC gene, which encodes the AraC transcription factor, as well as one or more genes under the control of the araBAD promoter. In the absence of arabinose, the AraC transcription factor adopts a conformation that represses transcription of genes under the control of the araBAD promoter. In the presence of arabinose, the AraC transcription factor undergoes a conformational change that allows it to bind to and activate the araBAD promoter, which induces expression of the desired gene, for example tetR, which represses expression of a toxin gene. In this embodiment, the toxin gene is repressed in the presence of arabinose or other sugar. In an environment where arabinose is not present, the tetR gene is not activated and the toxin is expressed, thereby killing the bacteria. The arabinose system can also be used to express an essential gene, in which the essential gene is only expressed in the presence of arabinose or other sugar and is not expressed when arabinose or other sugar is absent from the environment.

[0622] Thus, in some embodiments in which one or more heterologous gene(s) are expressed upon sensing arabinose in the exogenous environment, the one or more heterologous genes are directly or indirectly under the control of the araBAD promoter (P_{araBAD}). In some embodiments, the expressed heterologous gene is selected from one or more of the following: a heterologous therapeutic gene, a heterologous gene encoding an anti-toxin, a heterologous gene encoding a repressor protein or polypeptide, for example, a TetR repressor, a heterologous gene encoding an essential protein not found in the bacterial cell, and/or a heterologous encoding a regulatory protein or polypeptide.

[0623] Arabinose inducible promoters are known in the art, including Para, P_{araB}, P_{araC}, and P_{araBAD}. In one embodiment, the arabinose inducible promoter is from E. coli. In some embodiments, the P_{araC} promoter and the P_{araBAD} promoter operate as a bidirectional promoter, with the P_{araBAD} promoter controlling expression of a heterologous gene(s) in one direction, and the P_{araC} (in close proximity to, and on the opposite strand from the P_{araBAD} promoter), controlling expression of a heterologous gene(s) in the other direction. In the presence of arabinose, transcription of both heterologous genes from both promoters is induced. However, in the absence of arabinose, transcription of both heterologous genes from both promoters is not induced.

[0624] In one exemplary embodiment of the disclosure, the recombinant bacteria of the present disclosure contains a kill-switch having at least the following sequences: a P_{araBAD} promoter operably linked to a heterologous gene encoding a Tetracycline Repressor Protein (TetR), a P_{arac} promoter operably linked to a heterologous gene encoding AraC transcription factor, and a heterologous gene encoding a bacterial toxin operably linked to a promoter which is repressed by the Tetracycline Repressor Protein (P_{TetR}). In the presence of arabinose, the AraC transcription factor activates the P_{araBAD} promoter, which activates transcription of the TetR protein which, in turn, represses transcription of the toxin. In the absence of arabinose, however, AraC suppresses transcription from the P_{araBAD} promoter and no TetR protein is expressed. In this case, expression of the heterologous toxin gene is activated, and the toxin is expressed. The toxin builds up in the recombinant bacterial cell, and the recombinant bacterial cell is killed. In one embodiment, the araC gene encoding the AraC transcription factor is under the control of a constitutive promoter and is therefore constitutively expressed.

[0625] In one embodiment of the disclosure, the recombinant bacterium further comprises an anti-toxin under the control of a constitutive promoter. In this situation, in the presence of arabinose, the toxin is not expressed due to repression by TetR protein, and the anti-toxin protein builds-up in the cell. However, in the absence of arabinose, TetR protein is not expressed, and expression of the toxin is induced. The toxin begins to build-up within the recombinant bacterial cell. The recombinant bacterial cell is no longer viable once the toxin protein is present at either equal or greater amounts than that of the anti-toxin protein in the cell, and the recombinant bacterial cell will be killed by the toxin.

[0626] In another embodiment of the disclosure, the recombinant bacterium further comprises an anti-toxin under the control of the P_{araBAD} promoter. In this situation, in the presence of arabinose, TetR and the anti-toxin are expressed, the anti-toxin builds up in the cell, and the toxin is not expressed due to repression by TetR protein. However, in the absence of arabinose, both the TetR protein and the anti-toxin are not expressed, and expression of the toxin is induced. The toxin begins to build-up within the recombinant bacterial cell. The recombinant bacterial cell is no longer viable once the toxin protein is expressed, and the recombinant bacterial cell will be killed by the toxin.

[0627] In another exemplary embodiment of the disclosure, the recombinant bacteria of the present disclosure contains a kill-switch having at least the following sequences: a_{ParaBAD} promoter operably linked to a heterologous gene encoding an essential polypeptide not found in the recombinant bacterial cell (and required for survival), and a P_{araC} promoter operably linked to a heterologous gene encoding AraC transcription factor. In the presence of arabinose, the AraC transcription factor activates the P_{araBAD} promoter, which activates transcription of the heterologous gene encoding the essential polypeptide, allowing the recombinant bacterial cell to survive. In the absence of arabinose, however, AraC suppresses transcription from the P_{araBAD} promoter and the essential protein required for survival is not expressed. In this case, the recombinant bacterial cell dies in the absence of arabinose. In some embodiments, the sequence of P_{araBAD} promoter operably linked to a heterologous gene encoding an essential polypeptide not found in the recombinant bacterial cell can be present in the bacterial cell in conjunction with the TetR/toxin kill-switch system described directly above. In some embodiments, the sequence of P_{araBAD} promoter operably linked to a heterologous gene encoding an essential polypeptide not found in the recombinant bacterial cell can be present in the bacterial cell in conjunction with the TetR/toxin/anti-toxin kill-switch system described directly above.

[0628] In yet other embodiments, the bacteria may comprise a plasmid stability system with a plasmid that produces both a short-lived anti-toxin and a long-lived toxin. In this system, the bacterial cell produces equal amounts of toxin and anti-toxin to neutralize the toxin. However, if/when the cell loses the plasmid, the short-lived anti-toxin begins to decay. When the anti-toxin decays completely the cell dies as a result of the longer-lived toxin killing it.

[0629] In some embodiments, the engineered bacteria of the present disclosure further comprise the gene(s) encoding the components of any of the above-described kill-switch circuits.

[0630] In any of the above-described embodiments, the bacterial toxin may be selected from the group consisting of a lysin, Hok, Fst, TisB, LdrD, Kid, SymE, MazF, FlmA, Ibs, XCV2162, dinJ, CcdB, MazF, ParE, YafO, Zeta, hicB, relB, yhaV, yoeB, chpBK, hipA, microcin B, microcin B17, microcin C, microcin C7-051, microcin J25, microcin ColV, microcin 24, microcin L, microcin D93, microcin L, microcin E492, microcin H47, microcin 147, microcin M, colicin A, colicin E1, colicin K, colicin N, colicin U, colicin B, colicin Ia, colicin Ib, colicin 5, colicin 10, colicin S4, colicin Y, colicin E2, colicin E7, colicin E8, colicin E9, colicin E3, colicin E4, colicin E6, colicin E5, colicin D, colicin M, and cloacin DF13, or a biologically active fragment thereof.

[0631] In any of the above-described embodiments, the anti-toxin may be selected from the group consisting of an anti-lysin, Sok, RNAII, IstR, RdlD, Kis, SymR, MazE, FlmB, Sib, ptaRNA1, yafQ, CcdA, MazE, ParD, yafN, Epsilon, HicA, relE, prlF, yefM, chpBI, hipB, MccE, MccE^{CTD}, MccF, Cai, ImmE1, Cki, Cni, Cui, Cbi, Iia, Imm, Cfi, Im10, Csi, Cyi, Im2, Im7, Im8, Im9, Im3, Im4, ImmE6, cloacin immunity protein (Cim), ImmE5, ImmD, and Cmi, or a biologically active fragment thereof.

[0632] In one embodiment, the bacterial toxin is bactericidal to the recombinant bacterium. In one embodiment, the bacterial toxin is bacteriostatic to the recombinant bacterium.

[0633] In some embodiments, the recombinant bacterium provided herein is an auxotroph. In one embodiment, the recombinant bacterium is an auxotroph selected from a cysE, glnA, ilvD, leuB, lysA, serA, metA, glyA, hisB, ilvA, pheA, proA, thrC, trpC, tyrA, thyA, uraA, dapA, dapB, dapD, dapE, dapF, flhD, metB, metC, proAB, and thi1 auxotroph. In some embodiments, the engineered bacteria have more than one auxotrophy, for example, they may be a ΔthyA and ΔdapA auxotroph.

[0634] In some embodiments, the recombinant bacterium provided herein further comprises a kill-switch circuit, such as any of the kill-switch circuits provided herein. For example, in some embodiments, the recombinant bacteria further comprise one or more genes encoding one or more recombinase(s) under the control of an inducible promoter and an inverted toxin sequence. In some embodiments, the recombinant bacteria further comprise one or more genes encoding an anti-toxin. In some embodiments, the engineered bacteria further comprise one or more genes encoding one or more recombinase(s) under the control of an inducible promoter and one or more inverted excision genes, wherein the excision gene(s) encode an enzyme that deletes an essential gene. In some embodiments, the recombinant bacteria further comprise one or more genes encoding an anti-toxin. In some embodiments, the engineered bacteria further comprise one or more genes encoding a toxin under the control of a promoter having a TetR repressor binding site and a gene encoding the TetR under the control of an inducible promoter that is induced by arabinose, such as P_{araBAD}. In some embodiments, the recombinant bacteria further comprise one or more genes encoding an anti-toxin.

[0635] In some embodiments, the recombinant bacterium is an auxotroph comprising a therapeutic payload and further comprises a kill-switch circuit, such as any of the kill-switch circuits described herein.

[0636] In some embodiments of the above described recombinant bacteria, the gene or gene cassette for producing the effector molecule is present on a plasmid in the bacterium and operatively linked on the plasmid to the inducible promoter. In other embodiments, the gene or gene cassette for producing the effector molecule is present in the bacterial chromosome and is operatively linked in the chromosome to the inducible promoter.

[0637] Methods of Screening

[0638] Mutagenesis

[0639] In some embodiments, the inducible promoter is operably linked to a detectable product, e.g., GFP, and can be used to screen for mutants. In some embodiments, the inducible promoter is mutagenized, and mutants are selected based upon the level of detectable product, e.g., by flow cytometry, fluorescence-activated cell sorting (FACS) when the detectable product fluoresces. In some embodiments, one or more transcription factor binding sites is mutagenized to increase or decrease binding. In alternate embodiments, the wild-type binding sites are left intact and the remainder of the regulatory region is subjected to mutagenesis. In some embodiments, the mutant promoter is inserted into the recombinant bacteria to increase expression of the effector molecule under inducing conditions, as compared to unmutated bacteria of the same subtype under the same conditions. In some embodiments, the inducible promoter and/or corresponding transcription factor is a synthetic, non-naturally occurring sequence.

[0640] In some embodiments, the gene encoding an effector molecule is mutated to increase expression and/or stability of said molecule under inducing conditions, as compared to unmutated bacteria of the same subtype under the same conditions. In some embodiments, one or more of the genes in a gene cassette for producing an effector molecule is mutated to increase expression of said molecule under inducing conditions, as compared to unmutated bacteria of the same subtype under the same conditions. In some embodiments, the efficacy or activity of any of the importers and exporters for metabolites of interest can be improved through mutations in any of these genes. Mutations increase uptake or export of such metabolites, including but not limited to, tryptophan, e.g., under inducing conditions, as compared to unmutated bacteria of the same subtype under the same conditions. Methods for directed mutation and screening are known in the art.

[0641] Generation of Bacterial Strains with Enhance Ability to Transport Metabolites of Interest

[0642] Due to their ease of culture, short generation times, very high population densities and small genomes, microbes can be evolved to unique phenotypes in abbreviated timescales. Adaptive laboratory evolution (ALE) is the process of passaging microbes under selective pressure to evolve a strain with a preferred phenotype. Most commonly, this is applied to increase utilization of carbon/energy sources or adapting a strain to environmental stresses (e.g., temperature, pH), whereby mutant strains more capable of growth on the carbon substrate or under stress will outcompete the less adapted strains in the population and will eventually come to dominate the population.

[0643] This same process can be extended to any essential metabolite by creating an auxotroph. An auxotroph is a strain incapable of synthesizing an essential metabolite and must therefore have the metabolite provided in the media to grow. In this scenario, by making an auxotroph and passaging it on decreasing amounts of the metabolite, the resulting dominant strains should be more capable of obtaining and incorporating this essential metabolite.

[0644] For example, if the biosynthetic pathway for producing a metabolite of interest is disrupted a strain capable of high-affinity capture of the metabolite of interest can be evolved via ALE. First, the strain is grown in varying concentrations of the auxotrophic metabolite of interest, until a minimum concentration to support growth is established. The strain is then passaged at that concentration, and diluted into lowering concentrations of the metabolite of interest at regular intervals. Over time, cells that are most competitive for the metabolite of interest—at growth-limiting concentrations—will come to dominate the population. These strains will likely have mutations in their metabolite of interest-transporters resulting in increased ability to import the essential and limiting metabolite of interest.

[0645] Similarly, by using an auxotroph that cannot use an upstream metabolite to form the metabolite of interest, a strain can be evolved that not only can more efficiently import the upstream metabolite, but also convert the metabolite into the essential downstream metabolite of interest. These strains will also evolve mutations to increase import of the upstream metabolite, but may also contain mutations which increase expression or reaction kinetics of downstream enzymes, or that reduce competitive substrate utilization pathways.

[0646] A metabolite innate to the microbe can be made essential via mutational auxotrophy and selection applied with growth-limiting supplementation of the endogenous metabolite. However, phenotypes capable of consuming non-native compounds can be evolved by tying their consumption to the production of an essential compound. For example, if a gene from a different organism is isolated which can produce an essential compound or a precursor to an essential compound this gene can be recombinantly introduced and expressed in the heterologous host. This new host strain will now have the ability to synthesize an essential nutrient from a previously non-metabolizable substrate.

[0647] Hereby, a similar ALE process can be applied by creating an auxotroph incapable of converting an immediately downstream metabolite and selecting in growth-limiting amounts of the non-native compound with concurrent expression of the recombinant enzyme. This will result in mutations in the transport of the non-native substrate, expression and activity of the heterologous enzyme and expression and activity of downstream native enzymes. It should be emphasized that the key requirement in this process is the ability to tether the consumption of the non-native metabolite to the production of a metabolite essential to growth.

[0648] Once the basis of the selection mechanism is established and minimum levels of supplementation have been established, the actual ALE experimentation can proceed. Throughout this process several parameters must be vigilantly monitored. It is important that the cultures are maintained in an exponential growth phase and not allowed to reach saturation/stationary phase. This means that growth rates must be check during each passaging and subsequent dilutions adjusted accordingly. If growth rate improves to such a degree that dilutions become large, then the concentration of auxotrophic supplementation should be decreased such that growth rate is slowed, selection pressure is increased and dilutions are not so severe as to heavily bias subpopulations during passaging. In addition, at regular intervals cells should be diluted, grown on solid media and individual clones tested to confirm growth rate phenotypes observed in the ALE cultures.

[0649] Predicting when to halt the stop the ALE experiment also requires vigilance. As the success of directing evolution is tied directly to the number of mutations “screened” throughout the experiment and mutations are generally a function of errors during DNA replication, the cumulative cell divisions (CCD) acts as a proxy for total mutants which have been screened. Previous studies have shown that beneficial phenotypes for growth on different carbon sources can be isolated in about 10^{11.2} CCD¹. This rate can be accelerated by the addition of chemical mutagens to the cultures—such as N-methyl-N-nitro-N-nitrosoguanidine (NTG)—which causes increased DNA replication errors. However, when continued passaging leads to marginal or no improvement in growth rate the population has converged to some fitness maximum and the ALE experiment can be halted.

[0650] At the conclusion of the ALE experiment, the cells should be diluted, isolated on solid media and assayed for growth phenotypes matching that of the culture flask. Best performers from those selected are then prepped for genomic DNA and sent for whole genome sequencing. Sequencing with reveal mutations occurring around the genome capable of providing improved phenotypes, but will also contain silent mutations (those which provide no benefit but do not detract from desired phenotype). In cultures evolved in the presence of NTG or other chemical mutagen, there will be significantly more silent, background mutations. If satisfied with the best performing strain in its current state, the user can proceed to application with that strain. Otherwise the contributing mutations can be deconvoluted from the evolved strain by reintroducing the mutations to the parent strain by genome engineering techniques. See Lee, D.-H., Feist, A. M., Barrett, C. L. & Palsson, B. Ø. Cumulative Number of Cell Divisions as a Meaningful Timescale for Adaptive Laboratory Evolution of Escherichia coli. PLoS ONE 6, e26172 (2011).

[0651] Similar methods can be used to generate E. coli Nissle mutants that consume or import metabolites, including, but not limited to, tryptophan.

### Pharmaceutical Compositions and Formulations

[0652] Pharmaceutical compositions comprising one or more recombinant bacteria, alone or in combination with prophylactic agents, therapeutic agents, and/or pharmaceutically acceptable carriers are provided.

[0653] In certain embodiments, the pharmaceutical composition comprises one species, strain, or subtype of bacteria that are engineered to comprise the genetic modifications described herein, e.g., to produce an effector molecule. In alternate embodiments, the pharmaceutical composition comprises two or more species, strains, and/or subtypes of bacteria that are each engineered to comprise the genetic modifications described herein, e.g., to produce an effector molecule.

[0654] In certain embodiments, a combination of two or more different genetically engineered microorganisms can be administered at the same time. In some embodiments, the method comprises administering the a subject a combination of two or more genetically engineered microorganisms, a first microorganism which expresses a first payload, and at least a second microorganism which expresses a second payload. In some embodiments, the method comprises compositions comprising a combination of two or more genetically engineered microorganisms, a first microorganisms which expresses a first payload, and at least a second microorganism which expresses a second payload.

[0655] The pharmaceutical compositions described herein may be formulated in a conventional manner using one or more physiologically acceptable carriers comprising excipients and auxiliaries, which facilitate processing of the active ingredients into compositions for pharmaceutical use. Methods of formulating pharmaceutical compositions are known in the art (see, e.g., “Remington's Pharmaceutical Sciences,” Mack Publishing Co., Easton, PA). In some embodiments, the pharmaceutical compositions are subjected to tabletting, lyophilizing, direct compression, conventional mixing, dissolving, granulating, levigating, emulsifying, encapsulating, entrapping, or spray drying to form tablets, granulates, nanoparticles, nanocapsules, microcapsules, microtablets, pellets, or powders, which may be enterically coated or uncoated. Appropriate formulation depends on the route of administration.

[0656] The genetically engineered microorganisms may be formulated into pharmaceutical compositions in any suitable dosage form (e.g., liquids, capsules, sachet, hard capsules, soft capsules, tablets, enteric coated tablets, suspension powders, granules, or matrix sustained release formations for oral administration) and for any suitable type of administration (e.g., oral, topical, injectable, intravenous, sub-cutaneous, immediate-release, pulsatile-release, delayed-release, or sustained release). Suitable dosage amounts for the recombinant bacteria may range from about 10e5 to 10e12 bacteria, e.g., approximately 10e5 bacteria, approximately 10e6 bacteria, approximately 10e7 bacteria, approximately 10e8 bacteria, approximately 10e9 bacteria, approximately 10e10 bacteria, approximately 10e11 bacteria, or approximately 10e12 bacteria. The composition may be administered once or more daily, weekly, or monthly. The composition may be administered before, during, or following a meal. In one embodiment, the pharmaceutical composition is administered before the subject eats a meal. In one embodiment, the pharmaceutical composition is administered concurrently with a meal. In one embodiment, the pharmaceutical composition is administered after the subject eats a meal.

[0657] The recombinant bacteria may be formulated into pharmaceutical compositions comprising one or more pharmaceutically acceptable carriers, thickeners, diluents, buffers, buffering agents, surface active agents, neutral or cationic lipids, lipid complexes, liposomes, penetration enhancers, carrier compounds, and other pharmaceutically acceptable carriers or agents. For example, the pharmaceutical composition may include, but is not limited to, the addition of calcium bicarbonate, sodium bicarbonate, calcium phosphate, various sugars and types of starch, cellulose derivatives, gelatin, vegetable oils, polyethylene glycols, and surfactants, including, for example, polysorbate 20. In some embodiments, the recombinant bacteria may be formulated in a solution of sodium bicarbonate, e.g., 1 molar solution of sodium bicarbonate (to buffer an acidic cellular environment, such as the stomach, for example). The recombinant bacteria may be administered and formulated as neutral or salt forms. Pharmaceutically acceptable salts include those formed with anions such as those derived from hydrochloric, phosphoric, acetic, oxalic, tartaric acids, etc., and those formed with cations such as those derived from sodium, potassium, ammonium, calcium, ferric hydroxides, isopropylamine, triethylamine, 2-ethylamino ethanol, histidine, procaine, etc.

[0658] The genetically engineered microorganisms may be administered intravenously, e.g., by infusion or injection. The genetically engineered microorganisms of the disclosure may be administered intrathecally. In some embodiments, the genetically engineered microorganisms may be administered orally. The genetically engineered microorganisms disclosed herein may be administered topically and formulated in the form of an ointment, cream, transdermal patch, lotion, gel, shampoo, spray, aerosol, solution, emulsion, or other form well known to one of skill in the art. See, e.g., “Remington's Pharmaceutical Sciences,” Mack Publishing Co., Easton, PA. In an embodiment, for non-sprayable topical dosage forms, viscous to semi-solid or solid forms comprising a carrier or one or more excipients compatible with topical application and having a dynamic viscosity greater than water are employed. Suitable formulations include, but are not limited to, solutions, suspensions, emulsions, creams, ointments, powders, liniments, salves, etc., which may be sterilized or mixed with auxiliary agents (e.g., preservatives, stabilizers, wetting agents, buffers, or salts) for influencing various properties, e.g., osmotic pressure. Other suitable topical dosage forms include sprayable aerosol preparations wherein the active ingredient in combination with a solid or liquid inert carrier, is packaged in a mixture with a pressurized volatile (e.g., a gaseous propellant, such as freon) or in a squeeze bottle. Moisturizers or humectants can also be added to pharmaceutical compositions and dosage forms. Examples of such additional ingredients are well known in the art. In one embodiment, the pharmaceutical composition comprising the recombinant bacteria may be formulated as a hygiene product. For example, the hygiene product may be an antibacterial formulation, or a fermentation product such as a fermentation broth. Hygiene products may be, for example, shampoos, conditioners, creams, pastes, lotions, and lip balms.

[0659] The genetically engineered microorganisms disclosed herein may be administered orally and formulated as tablets, pills, dragees, capsules, liquids, gels, syrups, slurries, suspensions, etc. Pharmacological compositions for oral use can be made using a solid excipient, optionally grinding the resulting mixture, and processing the mixture of granules, after adding suitable auxiliaries if desired, to obtain tablets or dragee cores. Suitable excipients include, but are not limited to, fillers such as sugars, including lactose, sucrose, mannitol, or sorbitol; cellulose compositions such as maize starch, wheat starch, rice starch, potato starch, gelatin, gum tragacanth, methyl cellulose, hydroxypropylmethyl-cellulose, sodium carbomethylcellulose; and/or physiologically acceptable polymers such as polyvinylpyrrolidone (PVP) or polyethylene glycol (PEG). Disintegrating agents may also be added, such as cross-linked polyvinylpyrrolidone, agar, alginic acid or a salt thereof such as sodium alginate.

[0660] Tablets or capsules can be prepared by conventional means with pharmaceutically acceptable excipients such as binding agents (e.g., pregelatinised maize starch, polyvinylpyrrolidone, hydroxypropyl methylcellulose, carboxymethylcellulose, polyethylene glycol, sucrose, glucose, sorbitol, starch, gum, kaolin, and tragacanth); fillers (e.g., lactose, microcrystalline cellulose, or calcium hydrogen phosphate); lubricants (e.g., calcium, aluminum, zinc, stearic acid, polyethylene glycol, sodium lauryl sulfate, starch, sodium benzoate, L-leucine, magnesium stearate, talc, or silica); disintegrants (e.g., starch, potato starch, sodium starch glycolate, sugars, cellulose derivatives, silica powders); or wetting agents (e.g., sodium lauryl sulphate). The tablets may be coated by methods well known in the art. A coating shell may be present, and common membranes include, but are not limited to, polylactide, polyglycolic acid, polyanhydride, other biodegradable polymers, alginate-polylysine-alginate (APA), alginate-polymethylene-co-guanidine-alginate (A-PMCG-A), hydroymethylacrylate-methyl methacrylate (HEMA-MMA), multilayered HEMA-MMA-MAA, polyacrylonitrilevinylchloride (PAN-PVC), acrylonitrile/sodium methallylsulfonate (AN-69), polyethylene glycol/poly pentamethylcyclopentasiloxane/polydimethylsiloxane (PEG/PD5/PDMS), poly N,N-dimethyl acrylamide (PDMAAm), siliceous encapsulates, cellulose sulphate/sodium alginate/polymethylene-co-guanidine (CS/A/PMCG), cellulose acetate phthalate, calcium alginate, k-carrageenan-locust bean gum gel beads, gellan-xanthan beads, poly(lactide-co-glycolides), carrageenan, starch poly-anhydrides, starch polymethacrylates, polyamino acids, and enteric coating polymers.

[0661] In some embodiments, the genetically engineered microorganisms are enterically coated for release into the gut or a particular region of the gut, for example, the large intestine. The typical pH profile from the stomach to the colon is about 1-4 (stomach), 5.5-6 (duodenum), 7.3-8.0 (ileum), and 5.5-6.5 (colon). In some diseases, the pH profile may be modified. In some embodiments, the coating is degraded in specific pH environments in order to specify the site of release. In some embodiments, at least two coatings are used. In some embodiments, the outside coating and the inside coating are degraded at different pH levels.

[0662] Liquid preparations for oral administration may take the form of solutions, syrups, suspensions, or a dry product for constitution with water or other suitable vehicle before use. Such liquid preparations may be prepared by conventional means with pharmaceutically acceptable agents such as suspending agents (e.g., sorbitol syrup, cellulose derivatives, or hydrogenated edible fats); emulsifying agents (e.g., lecithin or acacia); non-aqueous vehicles (e.g., almond oil, oily esters, ethyl alcohol, or fractionated vegetable oils); and preservatives (e.g., methyl or propyl-p-hydroxybenzoates or sorbic acid). The preparations may also contain buffer salts, flavoring, coloring, and sweetening agents as appropriate. Preparations for oral administration may be suitably formulated for slow release, controlled release, or sustained release of the genetically engineered microorganisms described herein.

[0663] In one embodiment, the genetically engineered microorganisms of the disclosure may be formulated in a composition suitable for administration to pediatric subjects. As is well known in the art, children differ from adults in many aspects, including different rates of gastric emptying, pH, gastrointestinal permeability, etc. (Ivanovska et al., Pediatrics, 134(2):361-372, 2014). Moreover, pediatric formulation acceptability and preferences, such as route of administration and taste attributes, are critical for achieving acceptable pediatric compliance. Thus, in one embodiment, the composition suitable for administration to pediatric subjects may include easy-to-swallow or dissolvable dosage forms, or more palatable compositions, such as compositions with added flavors, sweeteners, or taste blockers. In one embodiment, a composition suitable for administration to pediatric subjects may also be suitable for administration to adults.

[0664] In one embodiment, the composition suitable for administration to pediatric subjects may include a solution, syrup, suspension, elixir, powder for reconstitution as suspension or solution, dispersible/effervescent tablet, chewable tablet, gummy candy, lollipop, freezer pop, troche, chewing gum, oral thin strip, orally disintegrating tablet, sachet, soft gelatin capsule, sprinkle oral powder, or granules. In one embodiment, the composition is a gummy candy, which is made from a gelatin base, giving the candy elasticity, desired chewy consistency, and longer shelf-life. In some embodiments, the gummy candy may also comprise sweeteners or flavors.

[0665] In one embodiment, the composition suitable for administration to pediatric subjects may include a flavor. As used herein, “flavor” is a substance (liquid or solid) that provides a distinct taste and aroma to the formulation. Flavors also help to improve the palatability of the formulation. Flavors include, but are not limited to, strawberry, vanilla, lemon, grape, bubble gum, and cherry.

[0666] In certain embodiments, the genetically engineered microorganisms may be orally administered, for example, with an inert diluent or an assimilable edible carrier. The compound may also be enclosed in a hard or soft shell gelatin capsule, compressed into tablets, or incorporated directly into the subject's diet. For oral therapeutic administration, the compounds may be incorporated with excipients and used in the form of ingestible tablets, buccal tablets, troches, capsules, elixirs, suspensions, syrups, wafers, and the like. To administer a compound by other than parenteral administration, it may be necessary to coat the compound with, or co-administer the compound with, a material to prevent its inactivation.

[0667] In another embodiment, the pharmaceutical composition comprising the recombinant bacteria may be a comestible product, for example, a food product. In one embodiment, the food product is milk, concentrated milk, fermented milk (yogurt, sour milk, frozen yogurt, lactic acid bacteria-fermented beverages), milk powder, ice cream, cream cheeses, dry cheeses, soybean milk, fermented soybean milk, vegetable-fruit juices, fruit juices, sports drinks, confectionery, candies, infant foods (such as infant cakes), nutritional food products, animal feeds, or dietary supplements. In one embodiment, the food product is a fermented food, such as a fermented dairy product. In one embodiment, the fermented dairy product is yogurt. In another embodiment, the fermented dairy product is cheese, milk, cream, ice cream, milk shake, or kefir. In another embodiment, the recombinant bacteria are combined in a preparation containing other live bacterial cells intended to serve as probiotics. In another embodiment, the food product is a beverage. In one embodiment, the beverage is a fruit juice-based beverage or a beverage containing plant or herbal extracts. In another embodiment, the food product is a jelly or a pudding. Other food products suitable for administration of the recombinant bacteria are well known in the art. For example, see U.S. 2015/0359894 and US 2015/0238545, the entire contents of each of which are expressly incorporated herein by reference. In yet another embodiment, the pharmaceutical composition is injected into, sprayed onto, or sprinkled onto a food product, such as bread, yogurt, or cheese.

[0668] In some embodiments, the composition is formulated for intraintestinal administration, intrajejunal administration, intraduodenal administration, intraileal administration, gastric shunt administration, or intracolic administration, via nanoparticles, nanocapsules, microcapsules, or microtablets, which are enterically coated or uncoated. The pharmaceutical compositions may also be formulated in rectal compositions such as suppositories or retention enemas, using, e.g., conventional suppository bases such as cocoa butter or other glycerides. The compositions may be suspensions, solutions, or emulsions in oily or aqueous vehicles, and may contain suspending, stabilizing and/or dispersing agents.

[0669] The genetically engineered microorganisms described herein may be administered intranasally, formulated in an aerosol form, spray, mist, or in the form of drops, and conveniently delivered in the form of an aerosol spray presentation from pressurized packs or a nebuliser, with the use of a suitable propellant (e.g., dichlorodifluoromethane, trichlorofluoromethane, dichlorotetrafluoroethane, carbon dioxide or other suitable gas). Pressurized aerosol dosage units may be determined by providing a valve to deliver a metered amount. Capsules and cartridges (e.g., of gelatin) for use in an inhaler or insufflator may be formulated containing a powder mix of the compound and a suitable powder base such as lactose or starch.

[0670] The genetically engineered microorganisms may be administered and formulated as depot preparations. Such long acting formulations may be administered by implantation or by injection, including intravenous injection, subcutaneous injection, local injection, direct injection, or infusion. For example, the compositions may be formulated with suitable polymeric or hydrophobic materials (e.g., as an emulsion in an acceptable oil) or ion exchange resins, or as sparingly soluble derivatives (e.g., as a sparingly soluble salt).

[0671] In some embodiments, disclosed herein are pharmaceutically acceptable compositions in single dosage forms. Single dosage forms may be in a liquid or a solid form. Single dosage forms may be administered directly to a patient without modification or may be diluted or reconstituted prior to administration. In certain embodiments, a single dosage form may be administered in bolus form, e.g., single injection, single oral dose, including an oral dose that comprises multiple tablets, capsule, pills, etc. In alternate embodiments, a single dosage form may be administered over a period of time, e.g., by infusion.

[0672] Single dosage forms of the pharmaceutical composition may be prepared by portioning the pharmaceutical composition into smaller aliquots, single dose containers, single dose liquid forms, or single dose solid forms, such as tablets, granulates, nanoparticles, nanocapsules, microcapsules, microtablets, pellets, or powders, which may be enterically coated or uncoated. A single dose in a solid form may be reconstituted by adding liquid, typically sterile water or saline solution, prior to administration to a patient.

[0673] In other embodiments, the composition can be delivered in a controlled release or sustained release system. In one embodiment, a pump may be used to achieve controlled or sustained release. In another embodiment, polymeric materials can be used to achieve controlled or sustained release of the therapies of the present disclosure (see e.g., U.S. Pat. No. 5,989,463). Examples of polymers used in sustained release formulations include, but are not limited to, poly(2-hydroxy ethyl methacrylate), poly(methyl methacrylate), poly(acrylic acid), poly(ethylene-co-vinyl acetate), poly(methacrylic acid), polyglycolides (PLG), polyanhydrides, poly(N-vinyl pyrrolidone), poly(vinyl alcohol), polyacrylamide, poly(ethylene glycol), polylactides (PLA), poly(lactide-co-glycolides) (PLGA), and polyorthoesters. The polymer used in a sustained release formulation may be inert, free of leachable impurities, stable on storage, sterile, and biodegradable. In some embodiments, a controlled or sustained release system can be placed in proximity of the prophylactic or therapeutic target, thus requiring only a fraction of the systemic dose. Any suitable technique known to one of skill in the art may be used.

[0674] Dosage regimens may be adjusted to provide a therapeutic response. Dosing can depend on several factors, including severity and responsiveness of the disease, route of administration, time course of treatment (days to months to years), and time to amelioration of the disease. For example, a single bolus may be administered at one time, several divided doses may be administered over a predetermined period of time, or the dose may be reduced or increased as indicated by the therapeutic situation. The specification for the dosage is dictated by the unique characteristics of the active compound and the particular therapeutic effect to be achieved. Dosage values may vary with the type and severity of the condition to be alleviated. For any particular subject, specific dosage regimens may be adjusted over time according to the individual need and the professional judgment of the treating clinician. Toxicity and therapeutic efficacy of compounds provided herein can be determined by standard pharmaceutical procedures in cell culture or animal models. For example, LD50, ED50, EC50, and IC50 may be determined, and the dose ratio between toxic and therapeutic effects (LD50/ED50) may be calculated as the therapeutic index. Compositions that exhibit toxic side effects may be used, with careful modifications to minimize potential damage to reduce side effects. Dosing may be estimated initially from cell culture assays and animal models. The data obtained from in vitro and in vivo assays and animal studies can be used in formulating a range of dosage for use in humans.

[0675] The ingredients are supplied either separately or mixed together in unit dosage form, for example, as a dry lyophilized powder or water-free concentrate in a hermetically sealed container such as an ampoule or sachet indicating the quantity of active agent. If the mode of administration is by injection, an ampoule of sterile water for injection or saline can be provided so that the ingredients may be mixed prior to administration.

[0676] The pharmaceutical compositions may be packaged in a hermetically sealed container such as an ampoule or sachet indicating the quantity of the agent. In one embodiment, one or more of the pharmaceutical compositions is supplied as a dry sterilized lyophilized powder or water-free concentrate in a hermetically sealed container and can be reconstituted (e.g., with water or saline) to the appropriate concentration for administration to a subject. In an embodiment, one or more of the prophylactic or therapeutic agents or pharmaceutical compositions is supplied as a dry sterile lyophilized powder in a hermetically sealed container stored between 2° C. and 8° C. and administered within 1 hour, within 3 hours, within 5 hours, within 6 hours, within 12 hours, within 24 hours, within 48 hours, within 72 hours, or within one week after being reconstituted. Cryoprotectants can be included for a lyophilized dosage form, principally 0-10% sucrose (optimally 0.5-1.0%). Other suitable cryoprotectants include trehalose and lactose. Other suitable bulking agents include glycine and arginine, either of which can be included at a concentration of 0-0.05%, and polysorbate-80 (optimally included at a concentration of 0.005-0.01%). Additional surfactants include but are not limited to polysorbate 20 and BRIJ surfactants. The pharmaceutical composition may be prepared as an injectable solution and can further comprise an agent useful as an adjuvant, such as those used to increase absorption or dispersion, e.g., hyaluronidase.

### Methods of Treatment

[0677] Another aspect provides methods of treating autoimmune disorders, cancer, metabolic diseases, diseases relating to inborn errors of metabolism, neurological or neurodegenerative diseases, diarrheal diseases, IBD, related diseases, and other diseases that benefit from reduced gut inflammation and/or enhanced gut barrier function. In some embodiments, the invention provides for the use of at least one genetically engineered species, strain, or subtype of bacteria described herein for the manufacture of a medicament. In some embodiments, the invention provides for the use of at least one genetically engineered species, strain, or subtype of bacteria described herein for the manufacture of a medicament for treating autoimmune disorders, cancer, metabolic diseases, diseases relating to inborn errors of metabolism, neurological or neurodegenerative diseases, diarrheal diseases, IBD, related diseases, and other diseases that benefit from reduced gut inflammation and/or enhanced gut barrier function. In some embodiments, the invention provides at least one genetically engineered species, strain, or subtype of bacteria described herein for use in treating autoimmune disorders, cancer, metabolic diseases, diseases relating to inborn errors of metabolism, neurological or neurodegenerative diseases, diarrheal diseases, IBD, related diseases, and other diseases that benefit from reduced gut inflammation and/or enhanced gut barrier function.

[0678] In some embodiments, the diarrheal disease is selected from the group consisting of acute watery diarrhea, e.g., cholera, acute bloody diarrhea, e.g., dysentery, and persistent diarrhea. In some embodiments, the IBD or related disease is selected from the group consisting of Crohn's disease, ulcerative colitis, collagenous colitis, lymphocytic colitis, diversion colitis, Behcet's disease, intermediate colitis, short bowel syndrome, ulcerative proctitis, proctosigmoiditis, left-sided colitis, pancolitis, and fulminant colitis.

[0679] In some embodiments, the disease or condition is an autoimmune disorder selected from the group consisting of acute disseminated encephalomyelitis (ADEM), acute necrotizing hemorrhagic leukoencephalitis, Addison's disease, agammaglobulinemia, alopecia areata, amyloidosis, ankylosing spondylitis, anti-GBM/anti-TBM nephritis, antiphospholipid syndrome (APS), autoimmune angioedema, autoimmune aplastic anemia, autoimmune dysautonomia, autoimmune hemolytic anemia, autoimmune hepatitis, autoimmune hyperlipidemia, autoimmune immunodeficiency, autoimmune inner ear disease (AIED), autoimmune myocarditis, autoimmune oophoritis, autoimmune pancreatitis, autoimmune retinopathy, autoimmune thrombocytopenic purpura (ATP), autoimmune thyroid disease, autoimmune urticarial, axonal & neuronal neuropathies, Balo disease, Behcet's disease, bullous pemphigoid, cardiomyopathy, Castleman disease, celiac disease, Chagas disease, chronic inflammatory demyelinating polyneuropathy (CIDP), chronic recurrent multifocal ostomyelitis (CRMO), Churg-Strauss syndrome, cicatricial pemphigoid/benign mucosal pemphigoid, Crohn's disease, Cogan's syndrome, cold agglutinin disease, congenital heart block, Coxsackie myocarditis, CREST disease, essential mixed cryoglobulinemia, demyelinating neuropathies, dermatitis herpetiformis, dermatomyositis, Devic's disease (neuromyelitis optica), discoid lupus, Dressler's syndrome, endometriosis, eosinophilic esophagitis, eosinophilic fasciitis, erythema nodosum, experimental allergic encephalomyelitis, Evans syndrome, fibrosing alveolitis, giant cell arteritis (temporal arteritis), giant cell myocarditis, glomerulonephritis, Goodpasture's syndrome, granulomatosis with polyangiitis (GPA), Graves' disease, Guillain-Barre syndrome, Hashimoto's encephalitis, Hashimoto's thyroiditis, hemolytic anemia, Henoch-Schonlein purpura, herpes gestationis, hypogammaglobulinemia, idiopathic thrombocytopenic purpura (ITP), IgA nephropathy, IgG4-related sclerosing disease, immunoregulatory lipoproteins, inclusion body myositis, interstitial cystitis, juvenile arthritis, juvenile idiopathic arthritis, juvenile myositis, Kawasaki syndrome, Lambert-Eaton syndrome, leukocytoclastic vasculitis, lichen planus, lichen sclerosus, ligneous conjunctivitis, linear IgA disease (LAD), lupus (systemic lupus erythematosus), chronic Lyme disease, Meniere's disease, microscopic polyangiitis, mixed connective tissue disease (MCTD), Mooren's ulcer, Mucha-Habermann disease, multiple sclerosis, myasthenia gravis, myositis, narcolepsy, neuromyelitis optica (Devic's), neutropenia, ocular cicatricial pemphigoid, optic neuritis, palindromic rheumatism, PANDAS (Pediatric Autoimmune Neuropsychiatric Disorders Associated with Streptococcus), paraneoplastic cerebellar degeneration, paroxysmal nocturnal hemoglobinuria (PNH), Parry Romberg syndrome, Parsonnage-Turner syndrome, pars planitis (peripheral uveitis), pemphigus, peripheral neuropathy, perivenous encephalomyelitis, pernicious anemia, POEMS syndrome, polyarteritis nodosa, type I, II, & III autoimmune polyglandular syndromes, polymyalgia rheumatic, polymyositis, postmyocardial infarction syndrome, postpericardiotomy syndrome, progesterone dermatitis, primary biliary cirrhosis, primary sclerosing cholangitis, psoriasis, psoriatic arthritis, idiopathic pulmonary fibrosis, pyoderma gangrenosum, pure red cell aplasia, Raynaud's phenomenon, reactive arthritis, reflex sympathetic dystrophy, Reiter's syndrome, relapsing polychondritis, restless legs syndrome, retroperitoneal fibrosis, rheumatic fever, rheumatoid arthritis, sarcoidosis, Schmidt syndrome, scleritis, scleroderma, Sjogren's syndrome, sperm & testicular autoimmunity, stiff person syndrome, subacute bacterial endocarditis (SBE), Susac's syndrome, sympathetic ophthalmia, Takayasu's arteritis, temporal arteritis/giant cell arteritis, thrombocytopenic purpura (TTP), Tolosa-Hunt syndrome, transverse myelitis, type 1 diabetes, asthma, ulcerative colitis, undifferentiated connective tissue disease (UCTD), uveitis, vasculitis, vesiculobullous dermatosis, vitiligo, and Wegener's granulomatosis. In some embodiments, the invention provides methods for reducing, ameliorating, or eliminating one or more symptom(s) associated with these diseases, including but not limited to diarrhea, bloody stool, mouth sores, perianal disease, abdominal pain, abdominal cramping, fever, fatigue, weight loss, iron deficiency, anemia, appetite loss, weight loss, anorexia, delayed growth, delayed pubertal development, and inflammation of the skin, eyes, joints, liver, and bile ducts. In some embodiments, the invention provides methods for reducing gut inflammation and/or enhancing gut barrier function, thereby ameliorating or preventing a systemic autoimmune disorder, e.g., asthma (Arrieta et al., 2015).

[0680] The method may comprise preparing a pharmaceutical composition with at least one genetically engineered species, strain, or subtype of bacteria described herein, and administering the pharmaceutical composition to a subject in a therapeutically effective amount.

[0681] In certain embodiments, the pharmaceutical composition described herein is administered to reduce gut inflammation, enhance gut barrier function, and/or treat or prevent an autoimmune disorder in a subject. In some embodiments, the methods of the present disclosure may reduce gut inflammation in a subject by at least about 10%, 20%, 25%, 30%, 40%, 50%, 60%, 70%, 75%, 80%, 85%, 90%, 95%, or more as compared to levels in an untreated or control subject. In some embodiments, the methods of the present disclosure may enhance gut barrier function in a subject by at least about 10%, 20%, 25%, 30%, 40%, 50%, 60%, 70%, 75%, 80%, 85%, 90%, 95%, or more as compared to levels in an untreated or control subject. In some embodiments, changes in inflammation and/or gut barrier function are measured by comparing a subject before and after administration of the pharmaceutical composition. In some embodiments, the method of treating or ameliorating the autoimmune disorder and/or the disease or condition associated with gut inflammation and/or compromised gut barrier function allows one or more symptoms of the disease or condition to improve by at least about 10%, 20%, 30%, 40%, 50%, 60%, 70%, 80%, 90%, 95%, or more.

[0682] In some embodiments, reduction is measured by comparing the levels of inflammation in a subject before and after administration of the pharmaceutical composition. In one embodiment, the levels of inflammation is reduced in the gut of the subject. In one embodiment, gut barrier function is enhanced in the gut of the subject. In another embodiment, levels of inflammation is reduced in the blood of the subject. In another embodiment, the levels of inflammation is reduced in the plasma of the subject. In another embodiment, levels of inflammation is reduced in the brain of the subject.

[0683] In one embodiment, the pharmaceutical composition described herein is administered to reduce levels of inflammation in a subject to normal levels. In another embodiment, the pharmaceutical composition described herein is administered to reduce levels of inflammation in a subject below normal.

[0684] In some embodiments, the method of treating the autoimmune disorder allows one or more symptoms of the condition or disorder to improve by at least about 10%, 20%, 30%, 40%, 50%, 60%, 70%, 80%, 90%, 95%, or more. In some embodiments, the method of treating the disorder, allows one or more symptoms of the condition or disorder to improve by at least about two-fold, three-fold, four-fold, five-fold, six-fold, seven-fold, eight-fold, nine-fold, or ten-fold.

[0685] Before, during, and after the administration of the pharmaceutical composition, gut inflammation and/or barrier function in the subject may be measured in a biological sample, such as blood, serum, plasma, urine, fecal matter, peritoneal fluid, intestinal mucosal scrapings, a sample collected from a tissue, and/or a sample collected from the contents of one or more of the following: the stomach, duodenum, jejunum, ileum, cecum, colon, rectum, and anal canal. In some embodiments, the methods may include administration of the compositions to enhance gut barrier function and/or to reduce gut inflammation to baseline levels, e.g., levels comparable to those of a healthy control, in a subject. In some embodiments, the methods may include administration of the compositions to reduce gut inflammation to undetectable levels in a subject, or to less than about 1%, 2%, 5%, 10%, 20%, 25%, 30%, 40%, 50%, 60%, 70%, 75%, or 80% of the subject's levels prior to treatment. In some embodiments, the methods may include administration of the compositions to enhance gut barrier function in a subject by about 1%, 2%, 5%, 10%, 20%, 25%, 30%, 40%, 50%, 60%, 70%, 75%, 80%, 90%, 100% or more of the subject's levels prior to treatment.

[0686] In certain embodiments, the recombinant bacteria are E. coli Nissle. The recombinant bacteria may be destroyed, e.g., by defense factors in the gut or blood serum (Sonnenborn et al., 2009) or by activation of a kill switch, several hours or days after administration. Thus, the pharmaceutical composition comprising the recombinant bacteria may be re-administered at a therapeutically effective dose and frequency. In alternate embodiments, the recombinant bacteria are not destroyed within hours or days after administration and may propagate and colonize the gut.

[0687] The pharmaceutical composition may be administered alone or in combination with one or more additional therapeutic agents, e.g., corticosteroids, aminosalicylates, anti-inflammatory agents. In some embodiments, the pharmaceutical composition is administered in conjunction with an anti-inflammatory drug (e.g., mesalazine, prednisolone, methylprednisolone, butesonide), an immunosuppressive drug (e.g., azathioprine, 6-mercaptopurine, methotrexate, cyclosporine, tacrolimus), an antibiotic (e.g., metronidazole, ornidazole, clarithromycin, rifaximin, ciprofloxacin, anti-TB), other probiotics, and/or biological agents (e.g., infliximab, adalimumab, certolizumab pegol) (Triantafillidis et al., 2011). An important consideration in the selection of the one or more additional therapeutic agents is that the agent(s) should be compatible with the recombinant bacteria, e.g., the agent(s) must not kill the bacteria. In one embodiments, the bacterial cells disclosed herein are administered to a subject once daily. In another embodiment, the bacterial cells disclosed herein are administered to a subject twice daily. In another embodiment, the bacterial cells disclosed herein are administered to a subject in combination with a meal, prior to a meal, or after a meal. The dosage of the pharmaceutical composition and the frequency of administration may be selected based on the severity of the symptoms and the progression of the disease. The appropriate therapeutically effective dose and/or frequency of administration can be selected by a treating clinician.

[0688] Another aspect provides methods of treating cancer. In some embodiments, the invention provides methods for reducing, ameliorating, or eliminating one or more symptom(s) associated with cancer. In some embodiments, the cancer is selected from adrenal cancer, adrenocortical carcinoma, anal cancer, appendix cancer, bile duct cancer, bladder cancer, bone cancer (e.g., Ewing sarcoma tumors, osteosarcoma, malignant fibrous histiocytoma), brain cancer (e.g., astrocytomas, brain stem glioma, craniopharyngioma, ependymoma), bronchial tumors, central nervous system tumors, breast cancer, Castleman disease, cervical cancer, colon cancer, rectal cancer, colorectal cancer, endometrial cancer, esophageal cancer, eye cancer, gallbladder cancer, gastrointestinal cancer, gastrointestinal carcinoid tumors, gastrointestinal stromal tumors, gestational trophoblastic disease, heart cancer, Kaposi sarcoma, kidney cancer, largyngeal cancer, hypopharyngeal cancer, leukemia (e.g., acute lymphoblastic leukemia, acute myeloid leukemia, chronic lymphocytic leukemia, chronic myelogenous leukemia), liver cancer, lung cancer, lymphoma (e.g., AIDS-related lymphoma, Burkitt lymphoma, cutaneous T cell lymphoma, Hodgkin lymphoma, Non-Hodgkin lymphoma, primary central nervous system lymphoma), malignant mesothelioma, multiple myeloma, myelodysplastic syndrome, nasal cavity cancer, paranasal sinus cancer, nasopharyngeal cancer, neuroblastoma, oral cavity cancer, oropharyngeal cancer, osteosarcoma, ovarian cancer, pancreatic cancer, penile cancer, pituitary tumors, prostate cancer, retinoblastoma, rhabdomyosarcoma, rhabdoid tumor, salivary gland cancer, sarcoma, skin cancer (e.g., basal cell carcinoma, melanoma), small intestine cancer, stomach cancer, teratoid tumor, testicular cancer, throat cancer, thymus cancer, thyroid cancer, unusual childhood cancers, urethral cancer, uterine cancer, uterine sarcoma, vaginal cancer, vulvar cancer, Waldenström macrogloblulinemia, and Wilms tumor. In some embodiments, the symptom(s) associated thereof include, but are not limited to, anemia, loss of appetite, irritation of bladder lining, bleeding and bruising (thrombocytopenia), changes in taste or smell, constipation, diarrhea, dry mouth, dysphagia, edema, fatigue, hair loss (alopecia), infection, infertility, lymphedema, mouth sores, nausea, pain, peripheral neuropathy, tooth decay, urinary tract infections, and/or problems with memory and concentration.

[0689] In certain embodiments, administering the pharmaceutical composition to the subject reduces cell proliferation, tumor growth, and/or tumor volume in a subject. In some embodiments, the methods of the present disclosure may reduce cell proliferation, tumor growth, and/or tumor volume by at least about 10%, 20%, 25%, 30%, 40%, 50%, 60%, 70%, 75%, 80%, 85%, 90%, 95%, or more as compared to levels in an untreated or control subject. In some embodiments, reduction is measured by comparing cell proliferation, tumor growth, and/or tumor volume in a subject before and after administration of the pharmaceutical composition. In some embodiments, the method of treating or ameliorating a cancer in a subject allows one or more symptoms of the cancer to improve by at least about 10%, 20%, 30%, 40%, 50%, 60%, 70%, 80%, 90%, 95%, or more.

[0690] Before, during, and after the administration of the pharmaceutical composition, cancerous cells and/or biomarkers in a subject may be measured in a biological sample, such as blood, serum, plasma, urine, peritoneal fluid, and/or a biopsy from a tissue or organ. In some embodiments, the methods may include administration of the compositions to reduce tumor volume in a subject to an undetectable size, or to less than about 1%, 2%, 5%, 10%, 20%, 25%, 30%, 40%, 50%, 60%, 70%, 75%, 80%, or 90% of the subject's tumor volume prior to treatment. In other embodiments, the methods may include administration of the compositions to reduce the cell proliferation rate or tumor growth rate in a subject to an undetectable rate, or to less than about 1%, 2%, 5%, 10%, 20%, 25%, 30%, 40%, 50%, 60%, 70%, 75%, 80%, or 90% of the rate prior to treatment.

[0691] For genetically engineered microorganisms expressing immune-based anti-cancer molecules, e.g., a single-chain CTLA-4 antibody, responses patterns may be different than for traditional cytotoxic therapies. For example, tumors treated with immune-based therapies may enlarge before they regress, and/or new lesions may appear (Agarwala et al., 2015). Increased tumor size may be due to heavy infiltration with lymphocytes and macrophages that are normally not present in tumor tissue. Additionally, response times may be slower than response times associated with standard therapies, e.g., cytotoxic therapies. In some embodiments, delivery of the anti-cancer molecule may modulate the growth of a subject's tumor and/or ameliorate the symptoms of a cancer while temporarily increasing the volume and/or size of the tumor.

[0692] The recombinant bacteria may be destroyed, e.g., by defense factors in tissues or blood serum (Sonnenborn et al., 2009), or by activation of a kill switch, several hours or days after administration. Thus, the pharmaceutical composition comprising the gene or gene cassette for producing the anti-cancer molecule may be re-administered at a therapeutically effective dose and frequency. In alternate embodiments, the recombinant bacteria are not destroyed within hours or days after administration and may propagate and colonize the tumor.

[0693] The pharmaceutical composition may be administered alone or in combination with one or more additional therapeutic agents, e.g., a chemotherapeutic drug such a methotrexate. An important consideration in selecting the one or more additional therapeutic agents is that the agent(s) should be compatible with the recombinant bacteria of the invention, e.g., the agent(s) must not kill the bacteria. In some studies, the efficacy of anticancer immunotherapy, e.g., CTLA-4 or PD-1 inhibitors, requires the presence of particular bacterial strains in the microbiome (Ilda et al., 2013; Vetizou et al., 2015; Sivan et al., 2015). In some embodiments, the pharmaceutical composition is administered with one or more commensal or probiotic bacteria, e.g., Bifidobacterium or Bacteroides.

[0694] In some embodiments, the recombinant bacteria are administered sequentially, simultaneously, or subsequently to dosing with one or more chemotherapeutic agents selected from Trabectedin®, Belotecan®, Cisplatin®, Carboplatin®, Bevacizumab®, Pazopanib®, 5-Fluorouracil, Capecitabine®, Irinotecan®, and Oxaliplatin®. In some embodiments, the recombinant bacteria are administered sequentially, simultaneously, or subsequently to dosing with gemcitabine (Gemzar). In any of these embodiments, the one or more bacteria are administered systemically or orally or intratumorally.

[0695] The immunostimulatory activity of bacterial DNA is mimicked by synthetic oligodeoxynucleotides (ODNs) expressing unmethylated CpG motifs. Bode et al., Expert Rev Vaccines. 2011 April; 10(4): 499-511. CpG DNA as a vaccine adjuvant. When used as vaccine adjuvants, CpG ODNs improve the function of professional antigen-presenting cells and boost the generation of humoral and cellular vaccine-specific immune responses. In some embodiments, CpG can be administered in combination with the genetically engineered bacteria of the invention.

[0696] In one embodiment, the genetically engineered microorganisms are administered in combination with tumor cell lysates.

[0697] The dosage of the pharmaceutical composition and the frequency of administration may be selected based on the severity of the symptoms and the progression of the cancer. The appropriate therapeutically effective dose and the frequency of administration can be selected by a treating clinician.

### EXAMPLES

[0698] The following examples provide illustrative embodiments of the disclosure. One of ordinary skill in the art will recognize the numerous modifications and variations that may be performed without altering the spirit or scope of the disclosure. Such modifications and variations are encompassed within the scope of the disclosure. The Examples do not in any way limit the disclosure.

### Example 1. Generation of Constructs for Overproducing Therapeutic Molecules for Secretion

[0699] To produce strain capable of secreting anti-inflammatory or gut barrier enhancer polypeptides, e.g., GLP2, IL-22, IL-10 (viral or human), several constructs are designed employing different secretion strategies. The organization of exemplary constructs is shown in FIG. 1A, FIG. 1B, FIG. 1C, FIG. 2A and FIG. 2B. Various constructs are synthesized, and cloned into vector pBR322 for transformation of E. coli. In some embodiments, the constructs encoding the effector molecules are integrated into the genome. In some embodiments, the constructs encoding the effector molecules are on a plasmid, e.g., a medium copy plasmid.

### Example 2. GLP-2-Secreting Strains

[0700] Engineered strains comprising GLP-2 constructs were prepared. The first strain comprises a deletion in PAL and a plasmid expressing GLP-2 with an OmpF secretion tag from a tetracycline-inducible promoter. The second strain comprises the same PAL deletion and the same plasmid expressing GLP-2, further comprising a deletion in degP. Additional strains are shown in Table 17 below.

TABLE 17
GLP-2 Secreting strains
DOM mut

PAL::CmR Ptet-ompF-GLP2
PAL::CmR ompT::Kan Ptet-ompF-GLP2
PAL::CmR ompT::Kan phoA-GLP2 fusion

### Example 3. IL-22-Secreting Strains

[0701] A synthetic construct was generated in which expression of IL-22 is controlled by the tetracycline-inducible promoter (Pₜₑₜ), which is derepressed via the addition of the tetracycline analog anhydrotetracycline (aTc), and translation is driven by a strong ribosome binding site (RBS) located immediately upstream from the IL-22 coding sequence. To promote translocation to the periplasm, a 21-amino acid PhoA-secretion tag was added to the N-terminus of IL-22.

[0702] The corresponding engineered element was constructed using a synthetic DNA cassette encoding the IL-22 protein coding sequence (IDT Technologies, Coralville, Iowa) which was cloned into an initial plasmid vector, creating the plasmid Logic435. The IL-22 sequence was later amplified and cloned using Gibson assembly technology and the NEBuilder Hifi Mastermix (NEB). The final pBR322-based plasmid was sequence-verified by Sanger sequencing (Genewiz) and designated Logic522.

[0703] To create a Gram-negative bacterium capable of secreting bioactive proteins, a diffusible outer membrane (DOM) phenotype was engineered in the E. coli Nissle background. A series of DOM mutants were created by deleting different periplasmic proteins leading to a ‘leaky’ phenotype. Deletions of several different genes were tested including lpp, pal, tolA and nlpI. For example, the pal mutant (SYN3000) showed a good secretion phenotype with little-to-no deleterious effect on growth rate while supporting strong production of effectors in the extracellular medium. Logic522 was inserted into SYN3000 to create the IL-22 secretion strain, SYN3001.

[0704] Additional constructs were also prepared. For example, one strain comprises a deletion in PAL and a plasmid expressing IL-22 with an OmpF secretion tag from a tetracycline-inducible promoter and another strain comprises the same PAL deletion and the same plasmid expressing IL-22, further comprising a deletion in degP. Additional strains are shown in Table 18.

TABLE 18
IL-22-secreting strains
Genotype

Lpp (delta lpp::CmR expressing PhoA-IL22 from Ptet)
nlpI (delta nlpl::CmR expressing PhoA-IL22 from Ptet)
tolA (delta tolA::CmR expressing PhoA-IL22 from Ptet)
PAL (delta pal::CmR expressing PhoA-IL22 from Ptet)

### Example 4. IL-10-Secreting Strains

[0705] In order to generate strains which secrete human IL-10, a base strain was used which has a “leaky membrane” phenotype (SYN1557), comprising delta PAL DOM background). For plasmid-based secretion construct, a codon optimized human IL10 sequence was combined with a number of secretion signals to determine the optimal configuration. Recently the Nissle genome was mined bioinformatically for signal sequences larger than the 21 AA PhoA tag. This yielded several candidates including the signal sequences from: ECOLIN_05715 (52 AA) (SEQ ID NO: 460), ECOLIN_16495 (40 AA) (SEQ ID NO: 464), ECOLIN_19410 (33 AA) (SEQ ID NO: 468) and ECOLIN_19880 (53 AA) (SEQ ID NO: 472). Additional signal peptides dsba, tolb, tort, ompA and pelB. Monomer IL10 or dimer IL10 (two IL10 monomer linked by a peptide linker) was constructed in combination with these signal peptides. These signal sequences were codon optimized and synthesized along with optimized RBS sequences, then inserted upstream of an optimized hIL10 sequence in a high copy pUC57 backbone. All of the candidate hIL10 constructs were then transformed into the delta PAL DOM background to test for secretion. Tables 19-23 list exemplary strains/construct sequences.

TABLE 19
Non-limiting IL-10 Construct Polynucleotide Sequences

| Description | SEQ ID NO |
|---|---|
| Construct comprising secretion tag of ECOLIN | SEQ ID NO: 488 |
| 19410 - human IL-10 - Linker (7aa) - human IL-10 | |
| Construct comprising PhoA secretion tag - | SEQ ID NO: 489 |
| human IL-10 - Linker (7aa) - human IL-10 | |
| PhoA Secretion Tag | SEQ ID NO: 490 |
| ECOLIN 19410 Tag | SEQ ID NO: 491 |
| human IL-10 - Linker (7aa) - human IL-10 | SEQ ID NO: 492 |
| Human IL-10 | SEQ ID NO: 493 |
| Linker | SEQ ID NO: 494 |

TABLE 20
Non-limiting IL-10 Construct Polypeptide Sequences

| Description | SEQ ID NO |
|---|---|
| Construct comprising secretion tag of ECOLIN | SEQ ID NO: 495 |
| 19410 - human IL-10 - Linker (7aa) - human IL-10 | |
| Construct comprising PhoA secretion tag - | SEQ ID NO: 496 |
| human IL-10 - Linker (7aa) - human IL-10 | |
| PhoA Secretion Tag | SEQ ID NO: 385 |
| ECOLIN 19410 Tag | SEQ ID NO: 397 |
| human IL-10 - Linker (7aa) - human IL-10 | SEQ ID NO: 143 |
| Human IL-10 | SEQ ID NO: 497 |
| Linker | SEQ ID NO: 498 |

TABLE 21
Non-limiting IL-10 Construct Polynucleotide Sequences

| Description | SEQ ID NO |
|---|---|
| Construct comprising secretion tag of dsba - | SEQ ID NO: 1220 |
| human IL-10 - Linker (7aa) - human IL-10 | |
| Construct comprising tolb secretion tag - | SEQ ID NO: 1221 |
| human IL-10 - Linker (7aa) - human IL-10 | |
| Construct comprising tort secretion tag - | SEQ ID NO: 1222 |
| human IL-10 - Linker (7aa) - human IL-10 | |
| Construct comprising ompA secretion tag - | SEQ ID NO: 1223 |
| human IL-10 - Linker (7aa) - human IL-10 | |
| Construct comprising pelB secretion tag - | SEQ ID NO: 1224 |
| human IL-10 - Linker (7aa) - human IL-10 | |
| dsba Secretion Tag | SEQ ID NO: 1112 |
| tolb Secretion Tag | SEQ ID NO: 1113 |
| tort Secretion Tag | SEQ ID NO: 1114 |
| ompA Secretion Tag | SEQ ID NO: 1115 |
| pelB Secretion Tag | SEQ ID NO: 1116 |
| Linker | SEQ ID NO: 1227 |
| Construct comprising secretion tag of dsba - | SEQ ID NO: 1220 |
| human IL-10 | |
| Construct comprising tolb secretion tag - | SEQ ID NO: 1228 |
| human IL-10 | |
| Construct comprising tort secretion tag - | SEQ ID NO: 1229 |
| human IL-10 | |

TABLE 22
Non-limiting IL-10 Construct Polypeptide Sequences

| Description | SEQ ID NO |
|---|---|
| Construct comprising secretion tag of dsba - | SEQ ID NO: 1230 |
| human IL-10 - Linker (7aa) - human IL-10 | |
| Construct comprising tolb secretion tag - | SEQ ID NO: 1231 |
| human IL-10 - Linker (7aa) - human IL-10 | |
| Construct comprising tort secretion tag - | SEQ ID NO: 1232 |
| human IL-10 - Linker (7aa) - human IL-10 | |
| Construct comprising ompA secretion tag - | SEQ ID NO: 1233 |
| human IL-10 - Linker (7aa) - human IL-10 | |
| Construct comprising pelB secretion tag - | SEQ ID NO: 1234 |
| human IL-10 - Linker (7aa) - human IL-10 | |
| dsba Secretion Tag | SEQ ID NO: 1092 |
| tolb Secretion Tag | SEQ ID NO: 1109 |
| tort Secretion Tag | SEQ ID NO: 1110 |
| ompA Secretion Tag | SEQ ID NO: 1111 |
| pelB Secretion Tag | SEQ ID NO: 1096 |
| Linker | SEQ ID NO: 1055 |
| Construct comprising secretion tag of dsba - | SEQ ID NO: 1237 |
| human IL-10 | |
| Construct comprising tolb secretion tag - | SEQ ID NO: 1238 |
| human IL-10 | |
| Construct comprising tort secretion tag - | SEQ ID NO: 1239 |
| human IL-10 | |

TABLE 23
Exemplary IL-10-secreting strains

| STRAIN | Genotype | Circuit |
|---|---|---|
| SYN1557 | pal::Cm | None |
| SYN2898 | pal::Cm | Ptet-OmpFss-hIL10 p15a |
| SYN2890 | pal::Cm | Ptet-ECOLIN_05715ss-hIL10 pUC57 |
| SYN2892 | pal::Cm | Ptet-ECOLIN_19410ss-hIL10 pUC57 |
| SYN2893 | pal::Cm | Ptet-ECOLIN_19880ss-hIL10 pUC57 |
| SYN3204 | pal::Cm | Ptet-dsba-mono-hIL10-linker-hIL10 pUC |
| SYN3205 | pal::Cm | Ptet-tolb-mono-hIL10-linker-hIL10 pUC |
| SYN3206 | pal::Cm | Ptet-tort-mono-hIL10-linker-hIL10 pUC |
| SYN3207 | pal::Cm | Ptet-ompA-mono-hIL10-linker-hIL10 pUC |
| SYN3208 | pal::Cm | Ptet-pelB-mono-hIL10-linker-hIL10 pUC |
| SYN3209 | pal::Cm | Ptet-dsba-mono-hIL10 pUC |
| SYN3210 | pal::Cm | Ptet-tolb-mono-hIL10 pUC |
| SYN3211 | pal::Cm | Ptet-tort-mono-hIL10 pUC |

### Example 5. IL-10-Secreting Strains (Dimerized IL-10)

[0706] To generate an engineered E. coli Nissle strain capable of secreting biologically active Interleukin 10 (IL-10), a construct was generated in which two interleukin-10 monomer subunits were covalently linked by a linker. The design used several components to accomplish the production of the dimerized human IL-10 protein product. To facilitate the dimerization of recombinant human IL-10 protein produced from E. coli Nissle, a 7 amino acid linker of ‘GGGSGGG (SEQ ID NO: 1055)’ was inserted between two monomer human IL-10 proteins to produce a forced dimer human IL-10 (diIL-10) fusion protein. The DNA sequence encoding this diIL-10 fusion protein was codon-optimized using publicly available methods. To promote translocation to the periplasm, a 32-amino acid secretion tag from the acid stress chaperone HdeB in E. coli (ECOLIN_19410) and designated tag 19410 was added to the N-terminus of the diIL-10 fusion protein. This tag not only mediates secretion into the periplasm but is putatively cleaved upon secretion preserving the N-terminal identity of the mature diIL-10 fusion protein. The DNA sequence containing the elements of the inducible Ptet promoter, ribosome binding site, diIL-10 coding sequence and other necessary linkers were synthesized by IDT Technologies and subsequently cloned into a high copy number plasmid vector provided by Life Technologies.

[0707] To create an E. coli Nissle derivative capable of secreting bioactive proteins, a engineered a diffusible outer membrane (DOM) phenotype was generated by deleting the gene encoding the periplasmic protein PAL. The resulting diffusible chassis strain was designated SYN1557. The plasmid was transformed into SYN1557 to create the dimerized human IL-10 (diIL-10) secretion strain SYN3139. SEQ ID NO: 488-498 and SEQ ID NO: 143, 385, and 397 are non-limiting examples of construct sequences.

### Example 6. GLP-2-Secreting Strains

[0708] To generate an engineered E. coli Nissle strain capable of secreting biologically active glucagon-like peptide 2 (GLP-2) a GLP2-FcIgA fusion protein was constructed.

[0709] To produce the recombinant GLP2-FcIgA-HIS fusion protein, a synthetic construct was devised as illustrated in FIG. 3. The design uses several components to accomplish the production of the GLP2-FcIgA-HIS fusion protein product. The 33 amino acid human glucagon-like peptide-2 (GLP-2) with the sequence of SEQ ID NO: 149 is fused to the N-terminus of the Fc portion of mouse IgA protein linked by a 20 amino acid linker. The Fc portion of mouse IgA used herein contains the hinge, CH2 and CH3 regions. An 8×HIS tag (SEQ ID NO: 1056) is fused to the C-terminus of FcIgA connected with a linker to facilitate downstream processing and detection. Expression of the gene encoding the GLP2-FcIgA-HIS fusion protein is controlled by the tetracycline-inducible promoter (Ptet) which is derepressed via the addition of the tetracycline analog anhydrotetracycline (aTc); translation is driven by a strong ribosome binding site (RBS) located upstream of the GLP2-FcIgA-HIS coding sequence. To promote translocation to the periplasm, a 32-amino acid secretion tag originally discovered in house from the acid stress chaperone HdeB in E. coli (ECOLIN_19410) and designated tag 19410 was added to the N-terminus of GLP2-FcIgA-HIS fusion protein. This tag not only mediates secretion into the periplasm but is putatively cleaved upon secretion preserving the N-terminal identity of the mature GLP2-FcIgA-HIS fusion protein. The DNA sequence containing the Ptet promoter, RBS, coding sequence for GLP2-FcIgA-HIS and other necessary linkers were synthesized by IDT Technologies and subsequently cloned into a high copy number plasmid vector provided by IDT Technologies.

[0710] To create a Gram-negative bacterium capable of secreting bioactive proteins, a diffusible outer membrane (DOM) phenotype in the E. coli Nissle background was engineered by deleting the gene encoding the periplasmic protein PAL. This alteration results in an increased rate of diffusion of periplasmic proteins to the external environment without compromising cell growth properties. The resulting ‘leaky’ chassis strain is designated SYN1557. The plasmid was transformed into SYN1557 to create the GLP2-FcIgA-HIS secretion strain SYN3074. SEQ ID NO: 499-536, 148, 149, 385, and 397 are of non-limiting examples of construct sequences for the expression and secretion of GLP-2 and other polypeptide fusion proteins for secretion.

TABLE 24
Non-limiting GLP-2 Construct Polypeptide Sequences

| Description | Sequence |
|---|---|
| Human IgA Fc | SEQ ID |
| | NO: 499 |
| Human IgA hinge region | SEQ ID |
| | NO: 500 |
| Construct comprising secretion tag from ECOLIN 19410 - | SEQ ID |
| human GLP2 - linker - Fc (mouse IgA) - 8X His Tag | NO: 501 |
| Construct comprising secretion tag from ECOLIN 19410 - | SEQ ID |
| human GLP2 - linker - Fc (mouse IgA) | NO: 502 |
| Construct comprising PhoA secretion tag -human GLP2 - | SEQ ID |
| linker - Fc (mouse IgA) - 8X His Tag | NO: 503 |
| Construct comprising PhoA secretion tag -human GLP2 - | SEQ ID |
| linker - Fc (mouse IgA) | NO: 504 |
| Construct comprising PhoA secretion tag -mutated | SEQ ID |
| human GLP2 - linker - Fc (mouse IgA) - 8X His Tag | NO: 505 |
| Construct comprising PhoA secretion tag -mutated | SEQ ID |
| human GLP2 - linker - Fc (mouse IgA) | NO: 506 |
| Construct comprising ECOLIN 19410 secretion tag -mutated | SEQ ID |
| human GLP2 - linker - Fc (mouse IgA) - 8X His Tag | NO: 507 |
| Construct comprising ECOLIN 19410 secretion tag -mutated | SEQ ID |
| human GLP2 - linker - Fc (mouse IgA) | NO: 508 |
| ECOLIN 19410 secretion tag | SEQ ID |
| | NO: 397 |
| Human GLP2 | SEQ ID |
| | NO: 148 |
| Linker | SEQ ID |
| | NO: 509 |
| Fc (mouse IgA) | SEQ ID |
| | NO: 510 |
| PhoA | SEQ ID |
| | NO: 385 |
| mutated human GLP2 | SEQ ID |
| | NO: 149 |
| Construct comprising PhoA secretion tag -human GLP2 - | SEQ ID |
| linker - Fc (human IgA) | NO: 512 |
| Construct comprising ECOLIN 19410 secretion tag - | SEQ ID |
| human GLP2 - linker - Fc (human IgA) - 8X His Tag | NO: 513 |
| Construct comprising ECOLIN 19410 secretion tag - | SEQ ID |
| human GLP2 - linker - Fc (human IgA) | NO: 514 |
| Construct comprising PhoA secretion tag -human GLP2 - | SEQ ID |
| linker - Fc (human IgA) - 8X His Tag | NO: 511 |

TABLE 25
Non-limiting GLP-2 Construct Polynucleotide Sequences

| Description | Sequence |
|---|---|
| Construct comprising secretion tag from ECOLIN | SEQ ID |
| 19410 -human GLP2- linker-Fc (mouse IgA) - 8X His Tag | NO: 515 |
| Construct comprising secretion tag from ECOLIN | SEQ ID |
| 19410 -human GLP2- linker-Fc (mouse IgA) | NO: 516 |
| Construct comprising PhoA secretion tag -human GLP2 - | SEQ ID |
| linker - Fc (mouse IgA) - 8X His Tag | NO: 517 |
| Construct comprising PhoA secretion tag -human GLP2 - | SEQ ID |
| linker - Fc (mouse IgA) | NO: 518 |
| Construct comprising PhoA secretion tag -mutated human | SEQ ID |
| GLP2 - linker - Fc (mouse IgA) - 8X His Tag | NO: 519 |
| Construct comprising PhoA secretion tag -mutated human | SEQ ID |
| GLP2 - linker - Fc (mouse IgA) | NO: 520 |
| Construct comprising ECOLIN 19410 secretion tag -mutated | SEQ ID |
| human GLP2 - linker - Fc (mouse IgA) - 8X His Tag | NO: 521 |
| Construct comprising ECOLIN 19410 secretion tag -mutated | SEQ ID |
| human GLP2 - linker - Fc (mouse IgA) | NO: 522 |
| Human GLP2 | SEQ ID |
| | NO: 523 |
| Linker | SEQ ID |
| | NO: 524 |
| Fc (mouse IgA) | SEQ ID |
| | NO: 525 |
| PhoA tag | SEQ ID |
| | NO: 490 |
| Mutated human GLP2 | SEQ ID |
| | NO: 526 |
| Fc (human IgA) | SEQ ID |
| | NO: 527 |
| Second sequence encoding Fc (human IgA) | SEQ ID |
| | NO: 528 |
| Construct comprising PhoA secretion tag -human GLP2 - | SEQ ID |
| linker - Fc (human IgA) - 8X His Tag | NO: 529 |
| Second construct comprising PhoA secretion tag -human | SEQ ID |
| GLP2 - linker - Fc (human IgA) - 8X His Tag | NO: 530 |
| Construct comprising PhoA secretion tag -human GLP2 - | SEQ ID |
| linker - Fc (human IgA) | NO: 531 |
| Second construct comprising PhoA secretion tag -human | SEQ ID |
| GLP2 - linker - Fc (human IgA) | NO: 532 |
| Construct comprising secretion tag from ECOLIN | SEQ ID |
| 19410 -human GLP2- linker-Fc (human IgA) - - 8X His Tag | NO: 533 |
| Second construct comprising secretion tag from ECOLIN | SEQ ID |
| 19410 -human GLP2-linker-Fc (human IgA) - - 8X His Tag | NO: 534 |
| Construct comprising secretion tag from ECOLIN | SEQ ID |
| 19410 -human GLP2- linker-Fc (human IgA) | NO: 535 |
| Second construct comprising secretion tag from ECOLIN | SEQ ID |
| 19410 -human GLP2-linker-Fc (human IgA) | NO: 536 |

### Example 7. Generation of Constructs and Bacteria for Cytokine Secretion

[0711] To produce strains capable of secreting immune modulatory polypeptides, e.g., cytokines, such as hIL-12, mIL-12, hIL-15, GMCSF, TNF-alpha, IFN-gamma, CXCL9 and CXCL10, several constructs were designed employing different secretion strategies. Various cytokine constructs were synthesized, and cloned into vector pBR322 for transformation of E. coli. In some embodiments, the constructs encoding the effector molecules are integrated into the genome. In some embodiments, the constructs encoding the effector molecules are on a plasmid, e.g., a medium copy plasmid.

[0712] Polypeptide sequences of exemplary cytokines used in the constructs include hIL-12a (SEQ ID NO: 1131), hIL-1213 (SEQ ID NO: 1132); mIL-12 (SEQ ID NO: 1131); mIL-1213 (SEQ ID NO: 1133); hIL-15 (SEQ ID NO: 1134); GMCSF (SEQ ID NO: 1135); TNF-alpha (extracellular portion) (SEQ ID NO: 1136); IFN-gamma (SEQ ID NO: 1137); CXCL10 (SEQ ID NO: 1138); and CXCL9 (SEQ ID NO: 1139). In some embodiments, recombinant bacteria comprise a nucleic acid sequence that encodes a polypeptide which is at least about 80%, 85%, 90%, 95%, or 99% homologous to the DNA sequence of SEQ ID NO: 1131-1139.

[0713] Nucleotide sequences of exemplary cytokines (codon optimized for expression in E. coli) used in the constructs include hIL-12a (SEQ ID NO: 1140), hIL-1213 (SEQ ID NO: 1141); mIL-12 (SEQ ID NO: 1142); mIL-1213 (SEQ ID NO: 1143); hIL-15 (SEQ ID NO: 1144); GMCSF (SEQ ID NO: 1145); TNF-alpha (extracellular portion) (SEQ ID NO: 1146); IFN-gamma (SEQ ID NO: 1147); and CXCL10 (SEQ ID NO: 1148). In some embodiments, recombinant bacteria comprise a nucleic acid sequence that is at least about 80%, 85%, 90%, 95%, or 99% homologous to the DNA sequence of SEQ ID Nos 1140-1148.

[0714] Exemplary secretion Tags and FliC components include fliC-FliC20 (SEQ ID NO: 894); flic-RBS (SEQ ID NO: 895-897); RBS-phoA (SEQ ID NO: 898); phoA (SEQ ID NO: 889); RBS-ompF (SEQ ID NO: 900); ompF (SEQ ID NO: 901); RBS-cvaC (SEQ ID NO: 902); cvaC (SEQ ID NO: 903); RBS-phoA (Optimized) (SEQ ID NO: 904); optimized phoA (SEQ ID NO: 905); RBS-TorA (SEQ ID NO: 906); TorA (SEQ ID NO: 907); RBS-TorA alternate (SEQ ID NO: 908); TorA (alternate) (SEQ ID NO: 909); RBS-fdnG (SEQ ID NO: 910); fdnG (SEQ ID NO: 911); RBS-dmsA (SEQ ID NO: 912); dmsA (SEQ ID NO: 913) and PelB. In some embodiments, recombinant bacteria comprise a nucleic acid sequence that is at least about 80%, 85%, 90%, 95%, or 99% homologous to the DNA sequence of SEQ ID Nos 894-913.

[0715] Exemplary promoter sequences and miscellaneous construct sequences include TetR/TetA Promoter (SEQ ID NO: 914); fliC Promoter (SEQ ID NO: 915); FnrS Promoter (SEQ ID NO: 916); DOM Construct Terminator (SEQ ID NO: 917); FRT Site (SEQ ID NO: 918); and Kanamycin Resistance Cassette (for integration in between FRT sites) (SEQ ID NO: 919). In some embodiments, recombinant bacteria comprise a nucleic acid sequence that is at least about 80%, 85%, 90%, 95%, or 99% homologous to the DNA sequence of SEQ ID NOs: 914-919.

[0716] Non-limiting examples of secretion constructs include human IL-12a construct with a N terminal OmpF secretion tag (sec-dependent secretion system) (SEQ ID NO: 920); human IL-12a construct with a N terminal PhoA secretion tag (SEQ ID NO: 921); human IL-12a construct with a N terminal TorA secretion tag (sec-dependent secretion system) (SEQ ID NO: 922); human IL-12b construct with a N terminal OmpF secretion tag (sec-dependent secretion system) (SEQ ID NO: 923); human IL-12b construct with a N terminal PhoA secretion tag (SEQ ID NO: 924); human IL-12 construct with a N terminal TorA secretion tag (sec-dependent secretion system) (SEQ ID NO: 925); murine IL-12a construct with a N terminal OmpF secretion tag (sec-dependent secretion system) (SEQ ID NO: 926); murine IL-12a construct with a N terminal PhoA secretion tag (SEQ ID NO: 927); murine IL-12a construct with a N terminal TorA secretion tag (sec-dependent secretion system) (SEQ ID NO: 928); murine IL-12b construct with a N terminal OmpF secretion tag (sec-dependent secretion system) (SEQ ID NO: 929); murine IL-12b construct with a N terminal PhoA secretion tag (SEQ ID NO: 930); murine IL-12b construct with a N terminal TorA secretion tag (sec-dependent secretion system) (SEQ ID NO: 931); human GMCSF construct with a N terminal OmpF secretion tag (sec-dependent secretion system) (SEQ ID NO: 932); human GMCSF construct with a N terminal PhoA secretion tag (SEQ ID NO: 933); human GMCSF construct with a N terminal TorA secretion tag (sec-dependent secretion system) (SEQ ID NO: 934); human IL-15 construct with a N terminal OmpF secretion tag (sec-dependent secretion system) (SEQ ID NO: 935); human IL-15 construct with a N terminal PhoA secretion tag (SEQ ID NO: 936); human IL-15 construct with a N terminal TorA secretion tag (sec-dependent secretion system) (SEQ ID NO: 937); human TNFa construct with a N terminal OmpF secretion tag (sec-dependent secretion system) (SEQ ID NO: 938); human TNFa construct with a N terminal PhoA secretion tag (SEQ ID NO: 939); human TNFa construct with a N terminal TorA secretion tag (sec-dependent secretion system) (SEQ ID NO: 940); human IFNg construct with a N terminal OmpF secretion tag (sec-dependent secretion system) (SEQ ID NO: 941); human IFNg construct with a N terminal PhoA secretion tag (SEQ ID NO: 942); human IFNg construct with a N terminal TorA secretion tag (sec-dependent secretion system) (SEQ ID NO: 943); murine CXCL10 construct with a N terminal OmpF secretion tag (sec-dependent secretion system) (SEQ ID NO: 1149); murine CXCL10 construct with a N terminal PhoA secretion tag (SEQ ID NO: 1150); murine CXCL10 construct with a N terminal TorA secretion tag (sec-dependent secretion system) (SEQ ID NO: 1151); human CXCL9 construct with a N terminal OmpF secretion tag (sec-dependent secretion system) (SEQ ID NO: 1152); human CXCL9 construct with a N terminal PhoA secretion tag; (SEQ ID NO: 1153); human CXCL9 construct with a N terminal TorA secretion tag (sec-dependent secretion system) (SEQ ID NO: 1154); murine CXCL9 construct with a N terminal OmpF secretion tag (sec-dependent secretion system) (SEQ ID NO: 1155); murine CXCL9 construct with a N terminal PhoA secretion tag (SEQ ID NO: 1156); murine CXCL9 construct with a N terminal TorA secretion tag (sec-dependent secretion system) (SEQ ID NO: 1157). In some embodiments, recombinant bacteria comprise a nucleic acid sequence encoding a polypeptide that is at least about 80%, at least about 85%, at least about 90%, at least about 95%, or at least about 99% homologous to the DNA sequence of SEQ ID NOs: 920-943 and 1149-1157.

[0717] Non-limiting examples of secretion constructs include human IL-12a construct with a N terminal PhoA secretion tag (SEQ ID NO: 953); human IL-12b construct with a N terminal PhoA secretion tag (SEQ ID NO: 954); murine IL-12a construct with a N terminal PhoA secretion tag; (SEQ ID NO: 955); murine IL-12b construct with a N terminal PhoA secretion tag; (SEQ ID NO: 956); human 11-15 construct with a N terminal PhoA secretion tag (SEQ ID NO: 957); human GMCSF construct with a N terminal PhoA secretion tag (SEQ ID NO: 958); human TNFa construct with a N terminal PhoA secretion tag (SEQ ID NO: 959); human IFNg construct with a N terminal PhoA secretion tag; (SEQ ID NO: 960); human CXCL10 construct with a N terminal PhoA secretion tag; (SEQ ID NO: 1158); murine CXCL10 construct with a N terminal PhoA secretion tag (SEQ ID NO: 1159); human CXCL9 construct with a N terminal PhoA secretion tag (SEQ ID NO: 1160); murine CXCL9 construct with a N terminal PhoA secretion tag (SEQ ID NO: 1161). In some embodiments, recombinant bacteria comprise a nucleic acid sequence that is at least about 80%, at least about 85%, at least about 90%, at least about 95%, or at least about 99% homologous to the DNA sequence of SEQ ID NOs: 953-960 and 1158-1161.

[0718] Additional examples of secretion constructs include Ptet.phoA-hIL12b-phoA-hIL12a (SEQ ID NO: 965); Ptet.phoA-mIL12b-phoA-mIL12a (SEQ ID NO: 966); Ptet.phoA-IL15 (SEQ ID NO: 967); Ptet.phoA-GMCSF (SEQ ID NO: 968); Ptet-phoA-TNFa (SEQ ID NO: 969); Ptet-phoA-IFNg (SEQ ID NO: 970); Ptet-phoA-hCXCL10 (SEQ ID NO:1162); Ptet-phoA-mCXCL10 (SEQ ID NO: 1163); Ptet-phoA-hCXCL9 (SEQ ID NO: 1164); and Ptet-phoA-mCXCL9 (SEQ ID NO: 1165). In some embodiments, recombinant bacteria comprise a nucleic acid sequence that is at least about 80%, at least about 85%, at least about 90%, at least about 95%, or at least about 99% homologous to the DNA sequence of SEQ ID NOs: 965-970 and 1162-1165.

### Example 8. Functional Assay for CXCL10

[0719] To determine whether CXCL10 secreted from any of the strains described above is functional, a Chemotaxis Assay is performed, essentially as described in Mikucki et al. (Mikucki, et al., Nat Commun. 2015; 6: 7458, the contents of which is herein incorporated by reference in its entirety).

[0720] Briefly, cell trace labeled naïve (or expanded) human CD8+ T cells are transferred into 24-well transwell plate (5 uM pore) with T cells on top (5×10⁵ cells) and rCXCL10/supernatants on bottom, in the presence or absence of PTX or anti-CXCL10). Cells are incubated for 3 hrs, and migrated cells are counted by flow cytometry. Alternatively, phosphoAKT is measured by flow, western or ELISA.

### Example 9. Cytokine Secretion (mIL-12 and hIL-12)

[0721] To determine whether the mIL-12 and hIL-12 expressed by engineered bacteria is secreted, the concentration of IL-12 in the bacterial supernatant from engineered strains comprising mIL-12 or hIL-12 secretion constructs/strains was measured. The strains comprise either a deletion in Lpp (lpp::Cm), nlpI (nlpI:Cm), tolA (tolA::Cm), or PAL (PAL::Cm). All strains further comprise either a plasmid expressing hIL-12 with a PhoA secretion tag or a plasmid expressing mIL-12 with a PhoA secretion tag from a tetracycline-inducible promoter.

[0722] E. coli Nissle strains were grown overnight in LB medium. Cultures were diluted 1:200 in LB and grown shaking (200 rpm) for 2 hours. Cultures were diluted to an optical density of 0.5 at which time anhydrous tetracycline (ATC) was added to cultures at a concentration of 100 ng/mL to induce expression of hIL-12. After 12 hours of induction, cells were spun down, and supernatant was collected. To generate cell free medium, the clarified supernatant was further filtered through a 0.22 micron filter to remove any remaining bacteria and placed on ice. Additionally, to detect intracellular recombinant protein production, pelleted were bacteria washed and resuspended in BugBuster™ (Millipore) with protease inhibitors and Ready-Lyse Lysozyme Solution (Epicentre), resulting in lysate concentrated 10-fold compared to original culture conditions. After incubation at room temperature for 10 minutes insoluble debris is spun down at 20 min at 12,000 rcf at 4° C. then placed on ice until further processing.

[0723] The concentration of mIL-12 or hIL-12 in the cell-free medium and in the bacterial cell extract was measured by mIL-12 ELISA (RnD Systems, Minneapolis, MN) or hIL-12 ELISA (RnD Systems, Minneapolis, MN), according to manufacturer's instructions. All samples were run in triplicate, and a standard curve was used to calculate secreted levels of mIL-12 or hIL-12. Standard curves were generated using recombinant mIL-12 or hIL-12. Wild type Nissle was included in the ELISA as a negative control, and no signal was observed. Table 26 and Table 27 summarize levels of mIL-12 and hIL-12 measured in the respective supernatants. The data show that both mIL-12 and h-IL-12 are secreted at various levels from the different bacterial strains.

TABLE 26
Concentration of mIL-12 secreted into the media

| | | | [mIL-12] |
|---|---|---|---|
| | | | (ng/ml) in |
| ID | Genotype | Construct | the medium |
| SYN1825 | Lpp (lpp::Cm) | pBR322.Ptet.phoA-mIL12 | 0.2 |
| SYN1826 | nlpI (nlpI::Cm) | pBR322.Ptet.phoA-mIL12 | 0.1 |
| SYN1827 | tolA | pBR322.Ptet.phoA-mIL12 | 0.1 |
| | (tolA::Cm) | | |
| SYN1828 | PAL (PAL::Cm) | pBR322.Ptet.phoA-mIL12 | 0.3 |

TABLE 27
Concentration of Secreted hIL-12

| | | | [hIL-12] |
|---|---|---|---|
| | | | (ng/ml) |
| ID | Genotype | Construct | in the medium |
| SYN1821 | Lpp (lpp::Cm) | pBR322.Ptet.phoA-hIL12 | 0.9 |
| SYN1822 | nlpl (nlpI::Cm) | pBR322.Ptet.phoA-hIL12 | 0.5 |
| SYN1823 | tolA | pBR322.Ptet.phoA-hIL12 | 0.5 |
| | (tolA::Cm) | | |
| SYN1824 | PAL | pBR322.Ptet.phoA-hIL12 | 0.3 |
| | (PAL::Cm) | | |

### Example 10. Cytokine Secretion (IL-15)

[0724] To determine whether the hIL-15 expressed by engineered bacteria is secreted, the concentration of hIL-15 in the bacterial supernatant from engineered strains comprising hIL-15 secretion constructs/strains was measured. The strains comprise either a deletion in Lpp (lpp::Cm), nlpI (nlpI:Cm), tolA (tolA::Cm), or PAL (PAL::Cm). All strains further comprise a plasmid expressing hIL-15 with a PhoA secretion tag.

[0725] E. coli Nissle strains were grown, induced and processed as described in the previous example for hIL12 and hIL-12.

[0726] The concentration of hIL-15 in the cell-free medium and in the bacterial cell extract was measured by hIL-15 ELISA (RnD Systems, Minneapolis, MN), according to manufacturer's instructions. All samples were run in triplicate, and a standard curve was used to calculate secreted levels of hIL-15. Standard curves were generated using recombinant hIL-15. Wild type Nissle was included in the ELISA as a negative control, and no signal was observed. Table 28 summarizes levels of hIL-15 measured in the respective supernatants. The data show that hIL-15 is secreted at various levels from the different bacterial strains.

TABLE 28
Concentration of Secreted hIL-15

| | | | [IL-15] |
|---|---|---|---|
| | | | (ng/ml) |
| ID | Genotype | Construct | in the medium |
| SYN1817 | Lpp (lpp::Cm) | pBR322.Ptet.phoA-IL15 | 27.9 |
| SYN1818 | nlpI (nlpI::Cm) | pBR322.Ptet.phoA-IL15 | 30.4 |
| SYN1819 | tolA (tolA::Cm) | pBR322.Ptet.phoA-IL15 | 33.8 |
| SYN1820 | PAL (PAL::Cm) | pBR322.Ptet.phoA-IL15 | 38.0 |

### Example 11. Functional Testing of Secreted IL-15

[0727] To test whether the IL-15 secreted from any of the strains described above is functional, a CTLL-2 proliferation assay is conducted as described in Soman et al. (Soman, G. et al., J Immunol Methods. 2009; 348(1-2): 83-94, the entire contents is incorporated by reference).

[0728] Briefly, CTLL-2 are grown in 200U/mL IL-2 and rinsed and equilibrated in media lacking IL-2. Cells are then seeded into 96-well plate (5×10⁴ cells/well) and exposed to 2× titration of rhIL-15 or supernatants starting at 2 ng/mL (or 20 IU/mL) (w or w/o anti-IL-15). Cells are incubated for 48 hrs and the cell titer is measured using a plate reader.

### Example 12. Cytokine Secretion (GMCSF)

[0729] To determine whether hGMCSF expressed by engineered bacteria is secreted, the concentration of hGMCSF in the bacterial supernatant from engineered strains comprising hGMCSF secretion constructs/strains was measured. The strains comprise either a deletion in Lpp (lpp::Cm), nlpI (nlpI:Cm), tolA (tolA::Cm), or PAL (PAL::Cm). All strains further comprise a plasmid expressing hGMCSF with a PhoA secretion tag.

[0730] E. coli Nissle strains were grown, induced and processed as described in the previous example for hIL12 and hIL-12.

[0731] The concentration of hGMCSF in the cell-free medium and in the bacterial cell extract was measured by hGMCSF ELISA (RnD Systems, Minneapolis, MN), according to manufacturer's instructions. All samples were run in triplicate, and a standard curve was used to calculate secreted levels of hGMCSF. Standard curves were generated using recombinant hGMCSF. Wild type Nissle was included in the ELISA as a negative control, and no signal was observed. Table 29 summarizes levels of hGMCSF measured in the respective supernatants. The data show that hGMCSF is secreted at various levels from the different bacterial strains.

TABLE 29
Concentration of Secreted GMCSF

| | | | | [GMCSF] | [GMCSF] |
|---|---|---|---|---|---|
| | | | | (ng/ml) | (ng/ml) |
| | | | | in the | in the |
| | | | | medium | medium |
| | | High copy | | High copy | Low copy |
| ID | Genotype | construct | Low copy construct | plasmid | plasmid |
| SYN094 | WT | None | None | 0.0 | 0.0 |
| SYN2036/ | lpp | PUC.Ptet.phoA- | PUN UNSX-TetR-Ptet- | 45.8 | 44.7 |
| SYN2093 | | GMCSF | phoA-GMCSF-UNS9 | | |
| SYN2038/ | PAL | PUC.Ptet.phoA- | PUN UNSX-TetR-Ptet- | 114.3 | 98.8 |
| SYN2103 | | GMCSF | phoA-GMCSF-UNS9 | | |
| SYN2037/ | nlpI | PUC.Ptet.phoA- | pUN UNSX-TetR-Ptet- | 39.9 | 44.0 |
| SYN2095 | | GMCSF | phoA-GMCSF-UNS9 | | |

### Example 13. Cytokine Secretion (TNFa)

[0732] To determine whether hTNFa expressed by engineered bacteria is secreted, the concentration of hTNFa in the bacterial supernatant from engineered strains comprising hTNFa secretion constructs/strains was measured. The strains comprise either a deletion in Lpp (lpp::Cm), nlpI (nlpI:Cm), tolA (tolA::Cm), or PAL (PAL::Cm). All strains further comprise a plasmid expressing hTNFa with a PhoA secretion tag.

[0733] E. coli Nissle strains were grown, induced and processed as described in the previous example for hIL12 and hIL-12.

[0734] The concentration of hTNFa in the cell-free medium and in the bacterial cell extract was measured by hTNFa ELISA (RnD Systems, Minneapolis, MN), according to manufacturer's instructions. All samples were run in triplicate, and a standard curve was used to calculate secreted levels of hTNFa. Standard curves were generated using recombinant hTNFa. Wild type Nissle was included in the ELISA as a negative control, and no signal was observed. Table 30 summarizes levels of hTNFa measured in the respective supernatants. The data show that hTNFa is secreted at various levels from the different bacterial strains.

TABLE 30
Concentration of Secreted TNFa

| | | | Secreted [TNFa] |
|---|---|---|---|
| Strain | Genotype | Construct | ng/ml |
| SYN094 | WT | None | 0 |
| SYN2541 | lpp::Cm | Nissle Ptet-phoA-TNFa | 129.6 |
| SYN2542 | nlpI::Cm | Nissle Ptet-phoA-TNFa | 345.3 |
| SYN2543 | PAL::Cm | Nissle Ptet-phoA-TNFa | >400 |
| SYN2544 | TrpE | HA3/4::Plpp-pKYNase | >400 |
| | PAL::Cm | Ptet-phoA-TNFa | |
| SYN2545 | TrpE | HA3/4::PSyn-pKYNase | >400 |
| | PAL::Cm | Ptet-phoA-TNFa | |

### Example 14. Cytokine Secretion (hIFNg)

[0735] To determine whether hIFNg expressed by engineered bacteria is secreted, the concentration of hIFNg in the bacterial supernatant from engineered strains comprising hTNFa secretion constructs/strains was measured. The strains comprise either a deletion in Lpp (lpp::Cm), nlpI (nlpI:Cm), tolA (tolA::Cm), or PAL (PAL::Cm). All strains further comprise a plasmid expressing hIFNg with a PhoA secretion tag.

[0736] E. coli Nissle strains were grown, induced and processed as described in the previous example for hIL12 and hIL-12.

[0737] The concentration of hIFNg in the cell-free medium and in the bacterial cell extract was measured by hIFNg ELISA (RnD Systems, Minneapolis, MN), according to manufacturer's instructions. All samples were run in triplicate, and a standard curve was used to calculate secreted levels of hIFNg. Standard curves were generated using recombinant hIFNg. Wild type Nissle was included in the ELISA as a negative control, and no signal was observed. Table 31 summarizes levels of hIFNg measured in the respective supernatants. The data show that hIFNg is secreted at various levels from the different bacterial strains.

TABLE 31
Concentration of Secreted IFNg

| | | | Secreted |
|---|---|---|---|
| Strain | Genotype | Construct | [IFNg] ng/ml |
| SYN094 | WT | None | 0 |
| SYN2546 | lpp::Cm | Nissle Ptet-phoA-IFNg | 44.9 |
| SYN2547 | nlpI::Cm | Nissle Ptet-phoA-IFNg | 51.5 |
| SYN2548 | PAL::Cm | Nissle Ptet-phoA-IFNg | 85.9 |
| SYN2549 | TrpE | HA3/4::Plpp-pKYNase | 39.1 |
| | PAL::Cm | Ptet-phoA-IFNg | |
| SYN2550 | TrpE | HA3/4::PSyn-pKYNase | 87.6 |
| | PAL::Cm | Ptet-phoA-IFNg | |

[0738] Table 32 provides a summary of the levels of secretion obtained for each cytokine, and lists some structural features of the cytokine which may explain some of the differences in secretion levels observed.

TABLE 32
Summary of Secretion Results

| | | | | | | Secretion |
|---|---|---|---|---|---|---|
| | Size | | O-linked | N-linked | Disulphide | level |
| Therapeutic | (Dal) | Stoichiometry | Glycosylation | Glycosylation | Bonds | (ng/mL) |
| hIL-12 | 57238 | Heterodimer | 1 | 4 | 7 | 0.9 |
| mIL-12 | 57496 | Heterodimer | 0 | 5 | 4 | 0.2 |
| hIL-15 | 14715 | Monomer | 0 | 1 | 2 | 38.0 |
| GMCSF | 14477 | Monomer | 4 | 2 | 2 | 114.0 |
| TNF-alpha | 17353 | Monomer | 1 | 0 | 1 | >400 |
| IFN-gamma | 16177 | Homodimer | 0 | 2 | 0 | 87.6 |

### Example 15. α-PD1-scFv Expression in E. coli

[0739] To determine whether a functional scFv can be expressed in E coli, an anti-PD1-scFv fragment was generated based on J43 monoclonal antibody, which reacts with mouse PD-1.

[0740] Mouse monoclonal antibody J43 sequence was obtained from patent EP 1445264 A1. Next, the single-chain variable fragment (scFv) was designed. A fragment containing tet promoter, a ribosome binding site, the designed J43-scFv, a C terminal V5 tag and a C terminal hexa-histidine tag (SEQ ID NO: 1166) was synthesized by IDTDNA. The construct was cloned into the pCR™-Blunt II-TOPOO Vector (Invitrogen) and transformed into E. coli DH5a as described herein to generate the plasmid pUC-ptet-J43scFv-V5-HIS (SEQ ID NO: 975). Additional sequences include nucleotide sequence for J43-Anti-PD1-scFv-V5-HIS (SEQ ID NO: 976); scFv Heavy chain (SEQ ID NO: 977); scFv light chain (SEQ ID NO: 978); scFv Linker (SEQ ID NO: 979). Polypeptide sequence of J43-Anti-PD1-scFV is included in SEQ ID NO: 980.

[0741] In some embodiments, the PD1-scFv is at least about 80%, 85%, 90%, 95%, or 99% homologous to the sequence of SEQ ID NOs: 975-980.

[0742] E. coli comprising either tet-inducible J43-Anti-PD1-scFv-V5 or wild type controls were grown overnight in LB medium. Cultures were diluted 1:40 in LB and grown shaking (250 rpm) to an optical density of 0.8 at which time anhydrous tetracycline (ATC) was added to cultures at a concentration of 100 ng/mL to induce expression of J43-Anti-PD1-scFv-V5. Same amount of tetracycline was added to wild type control cultures. After 4 hrs of induction, bacteria were pelleted, washed in PBS, and harvested, resuspended in 2 mL sonication buffer (PBS), and lysed by sonication on ice. Insoluble debris was spun down twice for 15 min at 12,000 rpm at 4° C.

[0743] Protein concentration was determined by BCA protein assay, and isolated extracts from wild type and strains comprising the Ptet-J43-Anti-PD1-scFV-V5 were analyzed by Western blot. Proteins were transferred onto PVDF membranes and J43-Anti-PD1-scFv was detected with an HRP-conjugated anti-V5 antibody (Biolegend). Results are shown in FIG. 16. A single band was detected at 27 kDa in lane 2 (extract from J43-Anti-PD1-scFv-V5 strain). No bands were detected in lane 1 (wild type extract).

[0744] To determine whether the single-chain antibody purified from E. coli DH5a functionally binds to the target protein, PD1, an ELISA assay was performed. Plates were absorbed overnight at 4° C. with 100 itL of 2 itg/mL per well of PD1 (Rndsystems). Wells were blocked with 2% BSA in PBS/0.1% Tween-20 for 2 hours at room temperature. After three washes, wells were incubated with bacterial extracts (J43-scFv-V5 or wild type-neg-ctrl) for 1 hour at room temperature. Wells were washed 4 times with PBST (PBS/0.1% Tween-20) and incubated with a HRP-conjugated anti-V5 antibody (Biolegend) in blocking solution for 40 min. Following incubation, wells were washed 4 times with PBST and then stained using a 3,3′,5,5′-tetramethylbenzidine (TMB). Signal intensities were measured using an ELISA reader at 450 nm. Results are shown in Table 33 and indicate that the antibody expressed by the recombinant bacteria can bind to PD1 specifically.

TABLE 33
ELISA Binding Assay

| | PBS | mPD1 | IgG | 2′ |
|---|---|---|---|---|
| 1′ antibody | coating | coating | coating | antibody |
| Wild type-neg-ctrl | 0.11 | 0.13 | 0.12 | α-V5-HRP |
| J43-scFv-V5 | 0.11 | 1.41 | 0.13 | α-V5-HRP |
| Wild type-neg-ctrl (1/2) | 0.10 | 0.09 | 0.10 | α-V5-HRP |
| J43-scFv-V5 (1/2) | 0.10 | 10.90 | 0.11 | α-V5-HRP |

[0745] Next, recombinant J43-Anti-scFv-V5 was expression using pET22b vector harvesting a C-terminal poly-histidine tag and purified using immobilized metal ion affinity chromatography. Protein concentration was determined by absorption at 280 nm and purity was confirmed by Coomassie gel (data not shown).

[0746] To determine whether anti-PD1-scFv expressed in E. coli binds to surface PD1 on mouse EL4 cells, flow cytometric analysis was performed using EL4 cells. EL4 are a mouse lymphoma cell line which expresses PD1 on its cell surface.

[0747] EL4 cells were grown in Dulbecco's Modified Eagle's Medium (DMEM) with 10% FBS. Cells were spun down, supernatant was aspirated, pellet was resuspended in 1 ml D-PBS, transferred into chilled assay tubes (1×106 cells), and washed 2-3 times in D-PBS with 0.5% BSA. Cells were resuspended in PBS with 0.5% BSA, to which the purified scFv-V5 and anti-V5-FITC antibody were added and incubated for 1 hour at room temperature. Negative control left out scFv-V5. Cells were resuspended in 0.5 ml PBS and analyzed on a flow cytometer. Results are shown in FIG. 17. A population shift is observed only when the purified anti-PD1-scFv-V5 and anti-V5-FITC were both present (two different batches were shown), relative to samples with EL4 alone and EL4 plus secondary antibody only.

### Example 16. Secretion of Anti-mPD1-scFv

[0748] To generate recombinant bacteria which are capable of secreting anti-mPD1-scFv, constructs were generated according to methods described herein as shown in Table 34.

TABLE 34
Strains for secretion of anti-mPD1-scFv

| Strain Number | Genotype | Construct |
|---|---|---|
| SYN2790 | Nissle delta nlpI::CmR | pUC-ptet-OmpF-FLAG-J43scFv-V5-HIS |
| SYN2767 | Nissle delta tolA::CmR | pUC-ptet-OmpF-FLAG-J43scFv-V5-HIS |
| SYN2768 | Nissle delta PAL::CmR | pUC-ptet-OmpF-FLAG-J43scFv-V5-HIS |
| SYN2769 | Nissle delta lpp::CmR | pUC-ptet-OmpF-FLAG-J43scFv-V5-HIS |
| SYN2770 | Nissle delta nlpI::CmR | pUC-ptet-PhoA-FLAG-J43scFv-V5-HIS |
| SYN2771 | Nissle delta tolA::CmR | pUC-ptet-PhoA-FLAG-J43scFv-V5-HIS |
| SYN2772 | Nissle delta PAL::CmR | pUC-ptet-PhoA-FLAG-J43scFv-V5-HIS |
| SYN2773 | Nissle delta lpp::CmR | pUC-ptet-PhoA-FLAG-J43scFv-V5-HIS |
| SYN2774 | Nissle delta nlpI::CmR | pUC-ptet-PelB-FLAG-J43scFv-V5-HIS |
| SYN2775 | Nissle delta tolA::CmR | pUC-ptet-PelB-FLAG-J43scFv-V5-HIS |
| SYN2776 | Nissle delta PAL::CmR | pUC-ptet-PelB-FLAG-J43scFv-V5-HIS |
| SYN2777 | Nissle delta lpp::CmR | pUC-ptet-PelB-FLAG-J43scFv-V5-HIS |

[0749] Exemplary secretion construct sequences include Ptet-phoA-FLAG-J43-scFv-V5-HIS (SEQ ID NO: 981); phoA-FLAG-J43-scFv-V5-HIS (SEQ ID NO: 982); Ptet-ompF-FLAG-J43-scFv-V5-HIS (SEQ ID NO: 983); ompF-FLAG-J43-scFv-V5-HIS (SEQ ID NO: 984); Ptet-PelB-FLAG-J43-scFv-V5-HIS (SEQ ID NO: 985); and PelB-FLAG-J43-scFv-V5-HIS (SEQ ID NO: 986). In some embodiments, the scFv Secretion Construct is at least about 80%, 85%, 90%, 95%, or 99% homologous to the sequence of SEQ ID NOs: 981-986.

[0750] E. coli Nissle comprising plasmid based construct comprising tet-inducible J43-Anti-scFv-V5 with PhoA, OmpF or PelB secretion tags or wild type control were grown overnight in LB medium. Cultures were diluted 1:100 in LB and grown shaking (200 rpm) to an optical density of 0.8 at which time cultures were cooled down to room temperature and anhydrous tetracycline (ATC) was added to cultures at a concentration of 100 ng/mL to induce expression of PhoA-, OmpF- or PelB-J43-Anti-scFv-V5. No tetracycline was added to wild type Nissle cultures. After 18 hrs of induction at room temperature, bacteria were pelleted, and the supernatant was collected and placed on ice.

[0751] Protein concentration in the medium and the cell lysates was determined by BCA protein assay, and isolated extracts and media from wild type and strains comprising the Ptet-J43-anti-scFv-V5 were analyzed by Western blot. Proteins were transferred onto PVDF membranes and J43-anti-scFv detected with an HRP-conjugated anti-V5 antibody (Biolegend). Results are shown in FIG. 18. A single band was detected around 34 kDa in lane 1-6 corresponding to extracts from SYN2767, SYN2769, SYN2771, SYN2773, SYN2775 and SYN2777 respectively.

[0752] To determine whether the secreted J43-anti-scFv in E coli Nissle binds to PD1 on mouse cells, flow cytometric analysis was performed using EL4 cells. EL4 are a mouse lymphoma cell line which expresses PD1 on its cell surface.

[0753] EL4 cells were grown in Dulbecco's Modified Eagle's Medium (DMEM) with 10% FBS and 1% Penicillin-Streptomycin Cells were spun down, supernatant was aspirated, pellet was resuspended in 1 ml D-PBS, transferred into chilled assay tubes (1×1⁰1\6 cells), and washed 3 times in D-PBS. Cells were resuspended in D-PBS with 0.5% BSA, to which the purified scFv-V5 and anti-V5-FITC antibody were added and incubated for 1 hour at room temperature. Negative control left out secreted J43-scFv-V5. Cells were then resuspended in 0.5 ml PBS and analyzed on a flow cytometer. Results are shown in (FIG. 19). A population shift is observed only when the secreted anti-PD1-scFv-V5 (1′ antibody) and anti-V5-FITC (2′ antibody) were both present, relative to samples with EL4 alone and EL4 plus secondary antibody only. A similar study was conducted with different amounts of the secreted scFv (0, 2, 5, and 15 jut), and a dose-dependent staining of the EL4 cells was observed (FIG. 20).

[0754] Next, a competition assay was conducted to determine whether PDL1 could inhibit the binding of the anti-PD1-scFv secreted by the recombinant bacteria from binding to murine PD1. EL4 cells were grown and flow cytometry protocol was conducted essentially as described above except that PDL1 was added at various concentrations (0, 5, 10, and 30 μg/mL) during the incubation of the secreted anti-PD1-scFv-V5. Rat-IgG was used as a negative control of secreted scFv. Results are shown in FIG. 21A and FIG. 21B. PDL1 competed in a dose dependent manner against the binding of secreted anti-mPD1-scFv to mPD1 on the surface of EL4 cells. Negative control of Rat-IgG protein did not show similar dose dependent binding competition.

### Example 17. Display of Anti-mPD1-scFv on E coli Nissle Cell Surface

[0755] To generate recombinant bacteria which are capable of displaying anti-mPD1-scFv on the Nissle cell surface, constructs were generated according to methods described herein as shown in Table 35. Selected display anchors include invasion display tag (SEQ ID NO: 990), LppOmpA display tag (SEQ ID NO: 991) and IntiminN display tag (SEQ ID NO: 992).

TABLE 35
Strains for display of anti-mPD1-scFv

| Strain | Host Strain | |
|---|---|---|
| Number | Genotype | Construct |
| SYN2797 | wt Nissle | p15A-Kan-ptet-Invasin-FLAG-J43scFv-V5-HIS |
| | | (SEQ ID NO: 987) |
| SYN2798 | wt Nissle | p15A-Kan-ptet-LppOmpA-FLAG-J43scFv-V5-HIS |
| | | (SEQ ID NO: 988) |
| SYN2799 | wt Nissle | p15A-Kan-ptet-IntiminN-FLAG-J43scFv-V5-HIS |
| | | (SEQ ID NO: 989) |

[0756] In some embodiments, the scFv Display Construct Sequence is at least about 80%, 85%, 90%, 95%, or 99% homologous to the sequence of SEQ ID NO: 987, SEQ ID NO: 988, and/or SEQ ID NO: 989.

[0757] In some embodiments, the display anchor is at least about 80%, 85%, 90%, 95%, or 99% homologous to the sequence of SEQ ID NO: 990, SEQ ID NO: 991, and/or SEQ ID NO: 992.

[0758] E. coli Nissle comprising a plasmid based construct comprising tet-inducible ptet-LppOmpA-anti-PD1-scFv was grown overnight in LB medium. Cultures were diluted 1:100 in LB and grown shaking (200 rpm) to an optical density of 0.8 at which time culture was cooled down to room temperature and anhydrous tetracycline (ATC) was added to cultures at a concentration of 100 ng/mL to induce expression of ptet-LppOmpA-J43-scFv for 18 hours.

[0759] To determine whether the single-chain antibody was displayed on the surface of the genetically engineered E. coli Nissle and functionally binds to PD1 a whole cell ELISA assay was performed. 1⁰1\9 cells were blocked using PBS with 2% BSA for 1 h at room temperature and biotinylated-mPD1 was added and incubated for 1 h at room temperature. Afterwards, cells were washed 3 times with PBST (PBS/0.1% Tween-20) and incubated with a streptavidin conjugated HRP in blocking solution for 40 min. Following incubation, wells were washed 3 times with PBST and resuspended in PBS, then stained using a 3,3′,5,5′-tetramethylbenzidine (TMB) substrate kit per the manufacturer's instructions (Thermofisher). Biotinylated IgG and plain PBS were used instead of mPD1 as negative controls. Cells were removed by centrifugation and supernatants were collected. Signal intensities of supernatant were measured using an ELISA reader at 450 nm. Results are shown in Table 36 and indicate that the J43-scFv (anti-mPD1) is displayed on the surface of the recombinant bacteria and can bind to mPD1.

TABLE 36
Nissle Surface Display ELISA Assay

| | | Primary | Secondary |
|---|---|---|---|
| Strain | OD450 | antibody | antibody |
| SYN2798 (p15A-ptet-LppOmpA-anti-PD1-scFv) | 0.125 | PBS only | Strp-HRP |
| SYN2798 (p15A-ptet-LppOmpA-anti-PD1-scFv) | 0.133 | mIgG-strp | Strp-HRP |
| SYN2798 (p15A-ptet-LppOmpA-anti-PD1-scFv) | 0.421 | mPD1-strp | Strp-HRP |

### Example 18. Anti-CD47 scFv Expression in E. coli

[0760] To determine whether a functional anti-CD47-scFv can be expressed in E. coli, an anti-CD47-scFv fragment was generated based on B6H12 and 5F9 monoclonal antibodies, which reacts with human CD47.

[0761] Monoclonal antibody B6H12 and 5F9 (anti human CD47) sequences were obtained from published patent (US 20130142786 A1). Next, the single-chain variable fragment (scFv) targeting human CD47 was designed. A fragment containing tet promoter, a ribosome binding site, the designed antihCD47-scFv, a C terminal V5 tag and a C terminal hexa-histidine tag (SEQ ID NO: 1166) was synthesized by IDTDNA. The construct was cloned into the pCR™-Blunt II-TOPOO Vector (Invitrogen) and transformed into E. coli DH5a as described herein to generate the plasmid pUC-ptet-B6H12antihCD47scFv-V5-HIS (SEQ ID NO: 993) and pUC-ptet-5F9antihCD47scFv-V5-HIS (SEQ ID NO: 995). B6H12-anti-CD47-scFv polypeptide sequence refers to SEQ ID NO: 994 and 5F9-anti-CD47-scFv polypeptide sequence refers to SEQ ID NO: 996.

[0762] In some embodiments, the Anti-CD47 scFv sequences is at least about 80%, 85%, 90%, 95%, or 99% homologous to the sequence of SEQ ID NO: 993, SEQ ID NO: 994, SEQ ID NO: 995, and/or SEQ ID NO: 996.

[0763] E. coli DH5a comprising pUC-ptet-B6H12antihCD47scFv-V5-HIS or pUC-ptet-5F9antihCD47scFv-V5-HIS were grown overnight in LB medium. Cultures were diluted 1:100 in LB and grown shaking (200 rpm) to an optical density of 0.8 at which time cultures were cooled down to room temperature and anhydrous tetracycline (ATC) was added to cultures at a concentration of 100 ng/mL to induce expression of ptet-scFv for 18 hours and then bacteria were pelleted, washed in PBS, and harvested, resuspended in 2 mL PBS buffer and lysed by sonication on ice. Insoluble debris is spun down twice for 15 min at 12,000 rpm at 4° C.

[0764] To determine whether the anti CD47 single-chain antibody expressed in E. coli DH5a functionally binds to the target protein, an ELISA assay was performed. Plates were absorbed overnight at 4° C. with 100 μL of 2 μg/mL per well of target proteins (humanCD47, mouseCD47, IgG and PBS, from Rndsystems). Wells were blocked with 2% BSA in PBS/0.1% Tween-20 for 2 hours at room temperature. After three washes, wells were incubated with bacterial extracts for 1 hour at room temperature. Wells were washed 4times with PBST (PBS/0.1% Tween-20) and incubated with a HRP-conjugated anti-V5 antibody(Biolegend) in blocking solution for 40 min. Following incubation, wells were washed 4 times with PBST and then stained using a 3,3′,5,5′-tetramethylbenzidine (TMB). Signal intensities were measured using an ELISA reader at 450 nm. Results are shown in Table 37 and indicate that the antiCD47-scFv expressed by the recombinant bacteria can bind to humanCD47 specifically.

TABLE 37
ELISA Binding Assay

| | | Primary | Secondary | |
|---|---|---|---|---|
| Strain | Coating | antibody | antibody | OD450 |
| SYN2936 (pUC-Ptet- | PBS | B6H12-scFv | Anti-V5-HRP | 0.047 |
| B6H12scFv-V5-HIS) | | extracts | | |
| SYN2936 (pUC-Ptet- | IgG | B6H12-scFv | Anti-V5-HRP | 0.064 |
| B6H12scFv-V5-HIS) | | extracts | | |
| SYN2936 (pUC-Ptet- | hCD47 | B6H12-scFv | Anti-V5-HRP | 1.587 |
| B6H12scFv-V5-HIS) | | extracts | | |
| SYN2936 (pUC-Ptet- | mCD47 | B6H12-scFv | Anti-V5-HRP | 0.053 |
| B6H12scFv-V5-HIS) | | extracts | | |
| SYN2937 (pUC-Ptet- | PBS | 5F9-scFv | Anti-V5-HRP | 0.048 |
| 5F9scFv-V5-HIS) | | extracts | | |
| SYN2937 (pUC-Ptet- | IgG | 5F9-scFv | Anti-V5-HRP | 0.057 |
| 5F9scFv-V5-HIS) | | extracts | | |
| SYN2937 (pUC-Ptet- | hCD47 | 5F9-scFv | Anti-V5-HRP | 1.838 |
| 5F9scFv-V5-HIS) | | extracts | | |
| SYN2937 (pUC-Ptet- | mCD47 | 5F9-scFv | Anti-V5-HRP | 0.053 |
| 5F9scFv-V5-HIS) | | extracts | | |

### Example 19. Tumor Pharmacokinetics for E. coli Nissle over a 7 Day Period

[0765] Tumor pharmacokinetics of streptomycin resistant Nissle were determined using a CT26 tumor model. CT26 cells obtained from ATCC were cultured according to guidelines provided. Approximately −1e6cells/mouse in PBS were implanted subcutaneously into the right flank of each animal (BalbC/J (female, 8 weeks)), and tumor growth was monitored for approximately 10 days. When the tumors reached about −100-150 mm3, animals were randomized into groups for dosing.

[0766] For intratumoral injection, bacterial strain (Streptomycin resistant Nissle (SYN094) was grown in LB broth until reaching an absorbance at 600 nm (A600 nm) of 0.4 (corresponding to 2×108 colony-forming units (CFU)/mL) and washed twice in PBS. The suspension was diluted in PBS or saline so that 100 microL can be injected at the appropriate doses intratumorally into tumor-bearing mice.

[0767] Approximately 10 days after CT 26 implantation, bacteria were suspended in 0.1 ml of PBS and mice were injected (1e7 and 1e8 cells/dose) with 100 ul intratumorally as follows: Group 1-SYN94 IT 10e7, 1.5 h (n=3); Group 2-SYN94 IT 10e8, 1.5 hh (n=3); Group 3-SYN94 IT 10e7, 4 h (n=3); Group 4-SYN94 IT 10e8, 4 h (n=3); Group 5-SYN94 IT 10e7, 24 h (n=3); Group 6-SYN94 IT 10e8, 24 h (n=3); Group 7-SYN94 IT 10e7, 72 h (n=3); Group 8-SYN94 IT 10e8, 72 h (n=3); Group 9-SYN94 IT 10e7, 7d (n=3); Group 10-SYN94 IT 10e8, 7d (n=3).

[0768] On day 1, animals were dosed intratumorally (IT) with 100u1 SYN94 at the two doses. At 1.5 and 4 h post dose, tumor, liver, lung and DLN tissue and blood was harvested. On day 2 (24 h post dose), on day 4 (72 hours post dose), and on day 7 (7d post dose) tissues and blood was harvested in the same manner as on Day 1.

[0769] In order to determine the CFU of bacteria in each sample, the blood samples were serially diluted, and the tissue samples were homogenized in PBS and serially diluted. Dilutions were plated onto LB plates containing streptomycin. The plates were incubated at 37° C. overnight, and colonies were counted. Bacterial counts in the tumor tissue were similar at both doses.

### Example 20. Tumor Pharmacokinetics for E coli Nissle and E coli Nissle DOM mutants

[0770] Tumor pharmacokinetics of streptomycin resistant Nissle and a Nissle DOM mutant (Nissle delta PAL::CmR) were compared in a CT26 tumor model.

[0771] CT26 cells obtained from ATCC were cultured according to guidelines provided.

[0772] Approximately −1e6cells/mouse in PBS were implanted subcutaneously into the right flank of each animal (BalbC/J (female, 8 weeks)), and tumor growth was monitored for approximately 10 days. When the tumors reached about −100-150 m^{m}3, animals were randomized into groups for dosing.

[0773] For intratumoral injection, bacterial strains (Streptomycin resistant Nissle (SYN094) and SYN1557 (Nissle delta PAL::CmR) were grown in LB broth until reaching an absorbance at 600 nm (A600 nm) of 0.4 (corresponding to 2×10⁸ colony-forming units (CFU)/mL) and washed twice in PBS. The suspension was diluted in PBS or saline so that 100 microL can be injected at the appropriate doses intratumorally into tumor-bearing mice.

[0774] Approximately 10 days after CT 26 implantation, bacteria were suspended in 0.1 ml of PBS and mice were injected (1e7 cells/dose) with 100 ul intratumorally as follows: Group 1-SYN1557, 1.5 h (n=3); Group 2-SYN94, 1.5 h (n=3); Group 3-SYN1557, 4 h (n=3); Group 4-SYN94, 4 h (n=3); Group 5-SYN1557, 24 h (n=3); Group 6-SYN94, 24 h (n=3); Group 7-SYN1557, 72 h (n=3); Group 8-SYN94, 72 h (n=3); Group 9-SYN1557, 7d (n=3); Group 10-SYN94, 7d (n=3).

[0775] On day 1, animals were dosed intratumorally (IT) with 100u1 SYN94 or SYN1557 (1e7 cells/dose). At 1.5 and 4 h post dose, tumor tissue and blood was harvested. For blood collection 20u1 was used for bacterial plating-process, and the rest of sample was used for serum. On day 2 (24 h post dose), on day 4 (72 hours post dose), and on day 7 (7d post dose) tumor tissue and blood was harvested the same as on Day 1.

[0776] In order to determine the CFU of bacteria in each sample, the blood samples were serially diluted, and the tumor sample was homogenized in PBS and serially diluted. Dilutions were plated onto LB plates containing streptomycin or chloramphenicol. The plates were incubated at 37° C. overnight, and colonies were counted. Bacterial counts in the tumor tissue were similar in both strains, and no bacteria were detected in the blood. These results indicate that both the wild type and the DOM mutant Nissle can survive in the tumor environment.

### Example 21. Secretion of murine CD40L

[0777] To generate recombinant bacteria which are capable of secreting CD40L, mCD40L1(47-260) and mCD40L2(122-260) constructs as shown in Table 38 were generated according to methods described herein. mCD40L1(47-260) and mCD40L2(122-260) correspond to extracellular portion of the full length mCD40L and soluble form of mCD4L, respectively. Nucleotide and polypeptide sequences for phoA-mCD40L1 (47-260) comprising a FLAG tag, V5 Tag, and His Tag are shown in SEQ ID NO: 1167 and 1169, respectively. Nucleotide and polypeptide sequences for phoA-mCD40L1 (112-260) comprising a FLAG tag, V5 Tag, and His Tag are shown in SEQ ID NO: 1168 and 1170, respectively. Polypeptide sequence for extracellular portion of human CD40L (47-261) is shown in SEQ ID NO: 1171.

TABLE 38
Strains for secretion of murine CD40L

| Strain Number | Genotype | Construct |
|---|---|---|
| SYN1557 | Nissle delta PAL::CmR | |
| (parental) | | |
| SYN3366 | Nissle delta PAL::CmR | pUC-ptet-phoA-mCD40L1 |
| | | (47-260) -V5-HIS |
| SYN3367 | Nissle delta PAL::CmR | pUC- ptet-phoA-mCD40L2 |
| | | (112-260) -V5-HIS |

[0778] E. coli Nissle comprising plasmid-based tet-inducible constructs comprising ptet-PhoA-CD40L1 (47-260) (SYN3366) and tet-PhoA-CD40L2 (112-260) (SYN3367) and the parental control strain SYN1557 were grown overnight in LB medium. Cultures were diluted 1:100 in LB and grown shaking (200 rpm) to an optical density of 0.8, at which time the cultures were cooled down to room temperature and anhydrous tetracycline (ATC) was added to cultures at a concentration of 100 ng/mL to induce expression of mCD40L1 and mCD40L2.

[0779] After 18 hours of induction, cells were spun down, and supernatant was collected. To generate cell free medium, the clarified supernatant was further filtered through a 0.22 micron filter to remove any remaining bacteria and placed on ice.

[0780] Supernatants were then analyzed by western blot. Proteins from 25 μL supernatant were transferred onto PVDF membranes and mCD40-L1 and mCD40L-2 were detected with an HRP-conjugated anti-V5 antibody (Biolegend). Results are shown in FIG. 22. A single band was detected around 32 kDa and 24 kDa for mCD40L1 and mCD40L2, respectively.

[0781] To determine whether the mCD40L secreted by the genetically engineered E. coli Nissle captured in the clarified supernatant can functionally bind to mCD40 and/or is detected by an anti-mCD40L antibody, an ELISA assay was performed by coating the plate with mCD40 or anti-mCD40L antibody. Results are shown in Table 39 and indicate that mCD40L1 (47-260) and mCD40L2 (112-260) secreted by the recombinant bacteria and can bind to mCD40.

TABLE 39
CD40 ELISA Binding Assay

Coating Materials

| Samples | mCD40 | Anti-mCD40L | IgG | PBS |
|---|---|---|---|---|
| PBS | 0.051 | 0.063 | 0.049 | 0.047 |
| Control | 0.054 | 0.065 | 0.052 | 0.054 |
| Secreted | 0.231 | 0.394 | 0.052 | 0.049 |
| CD40-L1 | | | | |
| Secreted | 0.639 | 0.825 | 0.052 | 0.05 |
| CD40-L2 | | | | |

### Example 22. Secretion of SIRPα and Variants and anti-CD47 scFv

[0782] To generate recombinant bacteria which are capable of secreting anti-SIRPA, constructs shown in Table 40 were generated according to methods described herein. Sequences for use in the secretion constructs include PhoA-mSIRPα(32-373)-tagged with FLAG, V5 and HIS tag (SEQ ID NO: 1172); PhoA-mCV1SIRPα tagged with FLAG, V5 and HIS tags (SEQ ID NO: 1173); mCV1SIRPα (SEQ ID NO: 1174); PhoA-mFD62XSIRPα tagged with FLAG, V5 and HIS tags (SEQ ID NO: 1175); PhoA-mCV1SIRPα-hIgG4 with V5 and HIS tags (SEQ ID NO: 1176); PhoA-mCV1SIRPα-hIgG4 (SEQ ID NO: 1177); mCV1SIRPα-hIgG4 (SEQ ID NO: 1177); PhoA-mFD6SIRPα-hIgG4 tagged with FLAG, V5 and HIS (SEQ ID NO: 1178); mFD6SIRPα-hIgG4 (SEQ ID NO: 1179); hIgG4 (SEQ ID NO: 1180); and PhoA-Anti-mouse CD47 scFv tagged with FLAG, V5 and HIS tags (SEQ ID NO: 1181).

[0783] Sequences of the corresponding polypeptides include PhoA-mSIRPα(32-373)-tagged with FLAG, V5 and HIS tag (SEQ ID NO: 1182); PhoA-mCV1SIRPα tagged with FLAG, V5 and HIS tags (SEQ ID NO: 1183); mCV1SIRPα (SEQ ID NO: 1184); PhoA-mFD62xSIRPα tagged with FLAG, V5 and HIS (SEQ ID NO: 1185); mFD6SIRPα (SEQ ID NO: 1186); PhoA-mCV1SIRPα-hIgG4 tagged with V5 and HIS (SEQ ID NO: 1187); PhoA-mCV1SIRPα-hIgG4 (SEQ ID NO: 1188); mCV1SIRPα-hIgG4 (SEQ ID NO: 1189); PhoA-mFD6SIRPα-hIgG4 tagged with FLAG, V5 and HIS (SEQ ID NO: 1190); PhoA-mFD6SIRPα-hIgG4 (SEQ ID NO: 1191); mFD6SIRPα-hIgG4 (SEQ ID NO: 1192); mFD6SIRPα (SEQ ID NO: 1193); hIgG4 (SEQ ID NO: 1194); PhoA-Anti-mouse CD47 scFv tagged with V5 and HIS tags (SEQ ID NO: 1195); hSIRPα (31-373) extracellular (SEQ ID NO: 1196); hSIRPα (374-394) helical (SEQ ID NO: 1197); and hSIRPα (395-504) cytoplasmic (SEQ ID NO: 1198)

TABLE 40
Strains for secretion of SIRPα, SIRPα variants and mCD47 scFv Ligand

| Strain Number | Genotype | Construct |
|---|---|---|
| SYN1557 (parental) | Nissle delta PAL::CmR | |
| SYN2996 | Nissle delta PAL::CmR | p15A-ptet-PhoA-FLAG-mSIRPa(32-373)-V5-HIS |
| SYN3159 | Nissle delta PAL::CmR | pUC-ptet-PhoA-FLAG-CV1sirpα-V5-HIS |
| SYN3160 | Nissle delta PAL::CmR | pUC-ptet-PhoA-FLAG-FD6x2sirpα-V5-HIS |
| SYN3021 | Nissle delta PAL::CmR | pUC-ptet-PhoA-SIRPαCV1hIgG4-V5-HIS |
| SYN3020 | Nissle delta PAL::CmR | pUC-ptet-PhoA-FD6sirpαhIgG4-V5-HIS |
| SYN3161 | Nissle delta PAL::CmR | pUC-tet-PhoA-αmCD47scFv-V5-HIS |

[0784] E. coli Nissle strains SYN1557, SYN2996, SYN3159, SYN3160, SYN3021, SYN3020, and SYN3161, were grown overnight in LB medium. Cultures were diluted 1:100 in LB and grown shaking (200 rpm) to an optical density of 0.8 at which time culture was cooled down to room temperature and anhydrous tetracycline (ATC) was added to cultures at a concentration of 100 ng/mL to induce expression of SIRPα or SIRPα variants, or CD47 scFvs.

[0785] After 18 hours of induction, cells were spun down, and supernatants were collected. To generate cell free medium, the clarified supernatants were further filtered through a 0.22 micron filter to remove any remaining bacteria and placed on ice.

[0786] Supernatant was then analyzed by western blot. Proteins in 25 μL supernatant were transferred onto PVDF membranes and SIRPα and SIRPα variants and anti-CD47 scFv were detected using anti-V5-HRP antibody (Biolegend). Results are shown in FIG. 23. A single band was detected around 46 kDa for WT mSIRPα, 20 kDa for CV1SIRPα, 33 kDa for FD6x2 SIRPα, 42 kDa for FD6SIRPα-IgG4, 42 kDa for CV1SIRPα-IgG4, and 30 kDa for anti-CD47 scFv, respectively.

[0787] To determine whether the wild type SIRPα, SIRPα variants, and anti-CD47-scFvs secreted by the genetically engineered E. coli Nissle can functionally bind to CD47 and/or are detected by an anti-SIRPα antibody, an ELISA assay was performed by coating the plate with corresponding antibodies or ligands. Results are shown in Table 41 and indicate that both the secreted mSIRPα and anti-mCD47scFv by the recombinant bacteria can bind to mCD47.

TABLE 41
SIRPα/CD47 ELISA Binding Assay

Coating Materials

| Samples | mCD47 | Anti-mSIRPa | IgG | PBS |
|---|---|---|---|---|
| PBS | 0.051 | 0.054 | 0.054 | 0.051 |
| Control | 0.056 | 0.052 | 0.053 | 0.054 |
| Secreted WT | 1.069 | 0.829 | 0.056 | 0.059 |
| mSIRPα | | | | |

| | Coating Materials | | |
|---|---|---|---|
| Samples | mCD47 | IgG | PBS |
| PBS | 0.046 | 0.053 | 0.048 |
| Control | 0.049 | 0.051 | 0.048 |
| Secreted | 0.527 | 0.067 | 0.053 |
| anti-mCD47 scFv | | | |

[0788] To determine whether the SIRPα, SIRPα variants, and anti-CD47 scFv secreted from in E coli Nissle bind to CD47 on mouse cells, flow cytometric analysis was performed using CT26 cells. CT26 is a mouse colon carcinoma cell line which expresses CD47 on its cell surface.

[0789] CT26 cells were grown in Dulbecco's Modified Eagle's Medium (DMEM) with 10% FBS and 1% Penicillin-Streptomycin. Cells were spun down, supernatant was aspirated, pellet was resuspended in 1 ml D-PBS, transferred into chilled assay tubes (1×10\hat{ }6 cells), and washed 3 times in D-PBS. Cells were resuspended in D-PBS with 0.5% BSA, to which the 10 jut of the supernatant (10× concentrated) were added and incubated for 1 hour at 4 C. Supernatant from SYN1557 was used as a baseline negative control. Cells were then resuspended in 0.5 ml PBS, diluted to proper concentration and analyzed on a flow cytometer. Results are shown in (FIG. 24 and FIG. 25). A population shift relative to baseline is observed for the samples containing the secreted SIRPα, SIRPα variants, and anti-CD47 scFv, with the greatest shift observed with SYN3021, expressing CV1SIRPα-IgG4.

[0790] Next, a competition assay was conducted to determine whether the murine SIRPα secreted by the recombinant bacteria could compete with the binding of a recombinant mSIRPα or an anti-CD47 antibody to murine CD47 on CT26 cells. CT26 cells were grown and flow cytometry protocol was conducted essentially as described above except that recombinant SIRPα (Rndsystems) or an anti-CD47 antibody (Biolegend) was added during the incubation of the secreted FD6x2sirpα or FD6sirpαhIgG4. FIG. 26 and FIG. 27 show the results of the competition with recombinant SIRPalpha and anti-CD47 antibody, respectively. Both recombinant SIRPalpha and anti-CD47 antibody were able to compete with the secreted SIRPalpha for the binding to CD47 on the CT26 cells.

### Example 23. Secretion of Hyaluronidase

[0791] To generate recombinant bacteria which are capable of secreting hyaluronidase, constructs were generated according to methods described herein as shown in FIG. 28A (SYN2998: Nissle delta PAL::CmR; p15A-ptet-RBS-PhoA-FLAG-human hyaluronidase-V5-His tags; SYN2997: Nissle delta PAL::CmR; p15A-ptet-RBS-PhoA-FLAG-human hyaluronidase-V5-His; SYN3369: Nissle delta PAL::CmR; p15A-ptet-RBS-PhoA-FLAG-leech hyaluronidase-V5-His). Sequences for use in the secretion constructs include PhoA-human hyaluronidase-tagged with FLAG, V5, and His (SEQ ID NO: 1199); PhoA-human hyaluronidase (SEQ ID NO: 1200); PhoA-mouse hyaluronidase-tagged with FLAG, V5 and His tags (SEQ ID NO: 1201); PhoA-leech hyaluronidase-tagged with FLAG, V5 and His tags (SEQ ID NO: 1202); and PhoA-leech hyaluronidase (SEQ ID NO: 1203). Sequences for the corresponding polypeptide include PhoA-human hyaluronidase-tagged with FLAG, V5, and His (SEQ ID NO: 1204); human hyaluronidase (SEQ ID NO: 1205); PhoA-human hyaluronidase (SEQ ID NO: 1206); PhoA-mouse hyaluronidase-tagged with FLAG, V5 and His tags (SEQ ID NO: 1207); and leech hyaluronidase (SEQ ID NO: 1208).

[0792] E. coli Nissle strains SYN1557, SYN2997 (secreting mouse hyaluronidase), SYN2998 (secreting human hyaluronidase) and SYN3369 (secreting leech hyaluronidase), were grown overnight in LB medium. Cultures were diluted 1:100 in LB and grown shaking (200 rpm) to an optical density of 0.8 at which time culture was cooled down to room temperature and anhydrous tetracycline (ATC) was added to cultures at a concentration of 100 ng/mL to induce expression hyaluronidase.

[0793] After 18 hours of induction, cells were spun down, and supernatant was collected. To generate cell free medium, the clarified supernatant was further filtered through a 0.22 micron filter to remove any remaining bacteria and placed on ice.

[0794] Supernatants were then analyzed by western blot. Proteins in 25 μL supernatant were transferred onto PVDF membranes and hyaluronidase was detected using anti-V5-HRP antibody (Biolegend). Results are shown in FIG. 28B. A single band was detected around 50 kDa for both secreted mouse and human hyaluronidases and around 57 kDa for leech hyaluronidase.

[0795] To determine whether the hyaluronidase secreted by the genetically engineered E. coli Nissle is active, a hyaluronidase activity assay on ability to cleave hyaluronan was performed, using biotinylated hyaluronate coated plate, according to manufacturer's instructions. Briefly, hyaluronidase will cleaved the polymer and result in the loss of biotin on plate which can then be detected by streptavidin-HPR and substrate. Results are shown in FIG. 29 and indicate that hyaluronidase secreted by the recombinant bacteria is able to degrade hyaluronan. The parental strain SYN1557 was used as a negative control. Results obtained for secreted leech hyaluronidase are shown in FIGS. 30A-C.

### Example 24. Anti-Cancer Molecules

[0796] Exemplary sequences for use in constructing single-chain antibodies for Flagellar Type III secretion include (1) anti CTLA-4 scFv (heavy chain—linker—light chain transcribed from the native FliC promoter and 5′UTR with an optimized ribosome binding site (SEQ ID NO: 765; SEQ ID NO: 766)); (2) anti CTLA-4 scFv (light chain—linker—heavy chain transcribed from the native FliC promoter and 5′UTR with an optimized ribosome binding site (SEQ ID NO: 767; SEQ ID NO: 768)); (3) anti PD-1 scFv (heavy chain—linker—light chain transcribed from the native FliC promoter and 5′UTR with an optimized ribosome binding site (SEQ ID NO: 769; SEQ ID NO: 770)); (4) anti PD-1 scFv (light chain—linker—heavy chain transcribed from the native FliC promoter and 5′UTR with an optimized ribosome binding site (SEQ ID NO: 771; SEQ ID NO: 772)); (5) anti PDL-1 scFv (heavy chain—linker—light chain transcribed from the native FliC promoter and 5′UTR with an optimized ribosome binding site (SEQ ID NO: 773; SEQ ID NO: 774)); (6) anti PDL-1 scFv (light chain—linker—heavy chain transcribed from the native FliC promoter and 5′UTR with an optimized ribosome binding site (SEQ ID NO: 775; SEQ ID NO: 776)).

[0797] In some embodiments, recombinant bacteria comprise a nucleic acid sequence that is at least about 80%, 85%, 90%, 95%, or 99% homologous to the DNA sequence or comprises a DNA sequence that encodes a polypeptide that is at least about 80%, 85%, 90%, 95%, or 99% homologous to SEQ ID Nos: 765-776.

[0798] Exemplary sequences for use in constructing single-chain antibodies for Type V auto-secretor (pic protein) secretion include (1) anti CTLA-4 scFv (heavy—linker—light transcribed from the native ptet (tetracycline responsive) promoter and with an optimized ribosome binding site expressed as a fusion protein with the native Nissle auto-secreter E. coli_01635; (SEQ ID NO: 777; SEQ ID NO: 778)); (2) anti CTLA-4 scFv (light—linker—heavy transcribed from the native ptet promoter and with an optimized ribosome binding site (SEQ ID NO: 779; SEQ ID NO: 780); (3) anti PD-1 scFv (heavy—linker—light transcribed from the native ptet promoter and with an optimized ribosome binding site; (SEQ ID NO: 781; SEQ ID NO: 782)); (4) anti PD-1 scFv (light—linker—heavy transcribed from the native ptet promoter and with an optimized ribosome binding site (SEQ ID NO:783; SEQ ID NO: 784)); (5) Anti PDL-1 scFv (heavy—linker—light transcribed from the native ptet promoter and with an optimized ribosome binding site (SEQ ID NO: 785; SEQ ID NO: 786)); (6) anti PDL-1 scFv (light—linker—heavy transcribed from the native ptet promoter and with an optimized ribosome binding site (SEQ ID NO: 787; SEQ ID NO: 788)); (7) anti CTLA-4 scFv (heavy—linker—light transcribed from the native ptet promoter and with an optimized ribosome binding site (SEQ ID NO: 777; SEQ ID NO: 778)); (8) anti CTLA-4 scFv (light—linker—heavy transcribed from the native ptet promoter and with an optimized ribosome binding site (SEQ ID NO: 779; SEQ ID NO: 780)); (9) anti PD-1 scFv (heavy—linker—light transcribed from the native ptet promoter and with an optimized ribosome binding site (SEQ ID NO: 781; SEQ ID NO: 782)); (10) anti PD-1 scFv (light—linker—heavy transcribed from the native ptet promoter and with an optimized ribosome binding site (SEQ ID NO: 783; SEQ ID NO: 784)); (11) anti PDL-1 scFv (heavy—linker—light transcribed from the native ptet promoter and with an optimized ribosome binding site (SEQ ID NO: 785; SEQ ID NO: 786)); (12) anti PDL-1 scFv (light—linker—heavy transcribed from the native ptet promoter and with an optimized ribosome binding site (SEQ ID NO: 787; SEQ ID NO: 788)).

[0799] In some embodiments, recombinant bacteria comprise a nucleic acid sequence that is at least about 80%, 85%, 90%, 95%, or 99% homologous to the DNA sequence or comprises a DNA sequence that encodes a polypeptide that is at least about 80%, 85%, 90%, 95%, or 99% homologous to SEQ ID NOS: 777-788.

[0800] Exemplary sequences for use in constructing single-chain antibodies for Type I hemolysin secretion include (1) anti CTLA-4 scFv (heavy chain—linker—light chain transcribed from the native ptet (tetracycline responsive) promoter and with an optimized ribosome binding site expressed as fusion protein with the 53 amino acids of the C termini of alpha-hemolysin (hlyA) of E. coli CFT073 (SEQ ID NO: 789; SEQ ID NO: 790)); (2) anti CTLA-4 scFv (light chain—linker— heavy chain transcribed from the native ptet promoter and with an optimized ribosome binding site expressed (SEQ ID NO: 791; SEQ ID NO: 792)); (3) anti PD-1 scFv (heavy chain—linker—light chain transcribed from the native ptet promoter and with an optimized ribosome binding site (SEQ ID NO: 793; SEQ ID NO: 794)); (4) anti PD-1 scFv (light chain—linker—heavy chain transcribed from the native ptet promoter and with an optimized ribosome binding site (SEQ ID NO: 795; SEQ ID NO: 796)); (5) anti PDL-1 scFv (heavy chain—linker—light chain transcribed from the native ptet promoter and with an optimized ribosome binding site (SEQ ID NO: 797; SEQ ID NO: 798)); (6) anti PD-1 scFv (light chain—linker—heavy chain transcribed from the native ptet promoter and with an optimized ribosome binding site (SEQ ID NO: 799; SEQ ID NO: 800)). Selected sequences for use in generating constructs for single chain antibody production and secretion include fliC promoter (SEQ ID NO: 801); fliC 5′ untranslated region (SEQ ID NO: 802); Tetracycline responsive promoter (SEQ ID NO: 803; SEQ ID NO: 804); Optimized ribosome binding sites (SEQ ID NOs: 805-817); terminator sequences (SEQ ID NOS: 818-820); N terminal secretion tag for Type V auto-secretor secretion (SEQ ID NO: 821); C terminal secretion tag for Type V auto-secretor secretion (SEQ ID NO: 822); Anti-CTLA-4 single chain antibody coding region (Heavy Chain—linker—Light Chain) (SEQ ID NO: 823); Anti-CTLA-4 single chain antibody coding region (Light Chain—linker—Heavy Chain) (SEQ ID NO: 824); Anti-PD-1 single chain antibody coding region (Heavy Chain—linker—Light Chain) (SEQ ID NO: 825); Anti-PD-1 single chain antibody coding region (Light Chain—linker —Heavy Chain) (SEQ ID NO: 826); Anti-PD-L1 single chain antibody coding region (Light Chain—linker—Heavy Chain) (SEQ ID NO: 827); Anti-PD-L1 single chain antibody coding region (Heavy Chain—linker—Light Chain) (SEQ ID NO: 828); Anti-CTLA-4 single chain antibody coding region (Heavy Chain—linker—Light Chain) with N terminal and C terminal Secretion Tag for Type V auto-secretor (SEQ ID NO: 829); Anti-CTLA-4 single chain antibody coding region (Light Chain—linker—Heavy Chain) with N terminal and C terminal Secretion Tag for Type V auto-secretor (SEQ ID NO: 830); Anti-PD-1 single chain antibody coding region (Heavy Chain—linker—Light Chain) with N terminal and C terminal Secretion Tag for Type V auto-secretor (SEQ ID NO: 831); Anti-PD-1 single chain antibody coding region (Light Chain—linker—Heavy Chain) with N terminal and C terminal Secretion Tag for Type V auto-secretor (SEQ ID NO: 832); Anti-PD-L1 single chain antibody coding region (Light Chain—linker—Heavy Chain) with N terminal and C terminal Secretion Tag for Type V auto-secretor (SEQ ID NO: 833); Anti-PD-L1 single chain antibody coding region (Heavy Chain—linker—Light Chain) with N terminal and C terminal Secretion Tag for Type V auto-secretor (SEQ ID NO: 834); Anti-CTLA-4 single chain antibody coding region (Heavy Chain—linker—Light Chain) for type I hemolysin secretion, including HlyA tag (SEQ ID NO: 835); Anti-CTLA-4 single chain antibody coding region (Light Chain—linker—Heavy Chain) for type I hemolysin secretion, including HlyA tag (SEQ ID NO: 836); Anti-PD-1 single chain antibody coding region (Heavy Chain—linker—Light Chain) for type I hemolysin secretion, including HlyA tag (SEQ ID NO: 837); Anti-PD-1 single chain antibody coding region (Light Chain—linker—Heavy Chain) for type I hemolysin secretion, including HlyA tag (SEQ ID NO: 838); Anti-PD-L1 single chain antibody coding region (Light Chain—linker—Heavy Chain) for type I hemolysin secretion, including HlyA tag (SEQ ID NO: 839); Anti-PD-L1 single chain antibody coding region (Heavy Chain—linker—Light Chain) for type I hemolysin secretion, including HlyA tag (SEQ ID NO: 840); C terminal HlyA secretion Tag (SEQ ID NO: 841); HlyB coding sequence (SEQ ID NO: 842); and HlyD coding sequence (SEQ ID NO: 843). Selected polypeptide sequences for single chain antibody production and secretion include Anti-CTLA-4 Heavy (SEQ ID NO: 844); Anti-CTLA-4 Light (SEQ ID NO: 845); Anti-PD-1 Heavy (SEQ ID NO: 846); Anti-PD-1 Light (SEQ ID NO: 847); Anti-PD-L1 Light (SEQ ID NO: 848); Anti-PD-L1 Heavy (SEQ ID NO: 849); Linker (SEQ ID NO: 850); N Terminal Secretion Tag For Type V Auto-secretor Secretion (SEQ ID NO: 851); C Terminal Secretion Tag For Type V Auto-secretor Secretion (SEQ ID NO: 852); C-Terminal HlyA Secretion Tag (SEQ ID NO: 853); HlyB (SEQ ID NO: 854); HlyD (SEQ ID NO: 855).

[0801] Single-chain antibodies or antibody fragments may be generated using the heavy and light chain variable regions and/or sequences disclosed herein. For example, PCR products corresponding to the heavy and light chain variable regions may be amplified, and spliced together with an intervening flexible peptide linker sequence. Non-limiting examples of polypeptide linkers that may be incorporated between the heavy and light chain variable region sequences include NH₂—

(SEQ ID NO: 1052)
GGGGSGGGGSGGGGS—COOH
and
(SEQ ID NO: 1051)
NH₂-SSADDAKKDAAKKDDAKKDDAKKDAS—COOH
(Griffin et al., 2002).

[0802] Modifications to the sequences disclosed herein, such as modifications to the complementarity determining regions and/or framework regions, may be designed in order to improve binding affinity for the target epitope (e.g., to lower_{K}D) and increase suitability for expression of a single-chain antibody from a bacterial cell.

[0803] The gene encoding the single-chain anti-CTLA-4 antibody or single-chain anti-PD-1 antibody is expressed under the control of each of the following promoters: a constitutive promoter, a tetracycline-inducible promoter with the tet repressor (TetR) expressed constitutively on a plasmid, or a FNR promoter selected from SEQ ID NOs: 1-12. As discussed herein, other promoters may be used.

[0804] The construct encoding the single-chain anti-CTLA-4 antibody or single-chain anti-PD-1 antibody is expressed on a high-copy plasmid, a low-copy plasmid, or a chromosome. For chromosomal expression, the insertion site may be anywhere in the genome, e.g., in a gene required for survival and/or growth (to create an auxotroph); in an active area of the genome, such as near the site of genome replication; and/or in between divergent promoters in order to reduce the risk of unintended transcription.

### Example 25. An Engineered IL-15-Producing E. coli Nissle Strain

[0805] Strain Construction and Biochemical Analysis:

[0806] To generate an engineered E. coli Nissle strain capable of secreting biologically active interleukin 15 (IL-15) a fusion protein was constructed, in which IL-15 is fused to the minimal region of IL-15Rα required for the formation of a functional receptor, known as the Sushi domain. IL-15 and IL-15Rα form functional complexes, which stimulate cell signaling, and activation and proliferation of neighboring lymphocytes expressing IL-2R13 and yc in a process called trans-presentation (see, e.g., Ochoa et al., Oncoimmunology. 2013; 2(4): e23410). The biological activity of IL-15 is greatly improved by two different modifications: an asparagine to aspartic acid substitution at amino acid 72 of IL-15 (Zhu X, Marcus W D, Xu W, Lee H I, Han K, Egan J O, Yovandich J L, Rhode P R, Wong H C. Novel human interleukin-15 agonists. J Immunol. 2009; 183:3598-3607) and/or direct fusion with the sushi domain of IL-15Rα by mimicking trans-presentation of IL-15 by cell-associated IL-15Rα (Mortier et al., i Biol Chem 2006: 281:1612-9).

[0807] To produce the modified recombinant IL-15-Sushi fusion protein, an IL-15 monomer with an N72D mutation was fused to the C-terminus of the sushi domain (78 amino acids) linked by a 20 amino acid linker. To the N-termini of the IL-15R sushi domain, a FLAG-tag and Factor Xa cleavage site was included to facilitate detection, purification and removal of the tag. To promote translocation to the periplasm, the IL15 fusion protein was cloned into a 10-member plasmid library. The coding sequence for the secreted fusion protein was codon optimized for expression in E. coli and ordered from IDT Technologies as a double-stranded DNA fragment. Once the DNA was received it was digested and ligated into the 10-member plasmid library using standard cloning procedures. Each member of the plasmid library contains a low-copy plasmid backbone and a Ptet promoter that drives expression of variable optimized ribosome-binding sites and secretion tags. Once the IL-15 fusion was cloned C-terminally of the secretion tags, the plasmids were transformed into SYN1557 (deltaPAL, diffusible outer membrane (DOM) phenotype) to create the IL-15-Sushi secretion strains SYN3516-SYN3525. Non-limiting examples of construct polypeptide sequences include human IL-15Rα sushi domain (SEQ ID NO: 1209); construct comprising PpiA secretion tag—FLAG-tag—Factor Xa site—Sushi—linker—human IL-15 (SEQ ID NO: 1210); Sushi—linker—human IL-15 (SEQ ID NO: 1211); secretion tag PpiA (SEQ ID NO: 1098); Human IL-15 (SEQ ID NO: 1212); and Linker (SEQ ID NO: 1213). Non-limiting IL-15 construct nucleotide sequences include codon optimized human IL-15Rα sushi domain (SEQ ID NO: 1214); codon optimized construct comprising PpiA secretion tag—FLAG tag—Factor Xa—human IL-15—linker—Sushi (SEQ ID NO: 1215); codon optimized human IL-15—linker—Sushi (SEQ ID NO: 1216); codon optimized secretion tag PpiA (SEQ ID NO: 1108); codon optimized human IL-15 (SEQ ID NO: 1217); codon optimized linker (SEQ ID NO: 1218); and codon optimized FLAG tag and Factor Xa site (SEQ ID NO: 1219). Table 43 provides a description of the IL-15-Sushi strains. Table 42 provides a listing of strains generated using WT IL-15.

TABLE 42
Strain descriptions

| ID | Genotype | Construct |
|---|---|---|
| SYN3424 | PAL (PAL::Cm) | pBR322.Ptet.PpiA |
| | | (ECOLIN_18620)-IL-15 |
| SYN3423 | PAL (PAL::Cm) | pBR322.Ptet.phoA-IL-15 |
| SYN3422 | PAL (PAL::Cm) | pBR322.Ptet.PelB-IL-15 |
| SYN3421 | PAL (PAL::Cm) | pBR322.Ptet.OppA-IL-15 |
| SYN3420 | PAL (PAL::Cm) | pBR322.Ptet.MalE-IL-15 |
| SYN3419 | PAL (PAL::Cm) | pBR322.Ptet.HdeB-IL-15 |
| SYN3418 | PAL (PAL::Cm) | pBR322.Ptet.GspD-IL-15 |
| SYN3417 | PAL (PAL::Cm) | pBR322.Ptet.Gltl- IL-15 |
| SYN3416 | PAL (PAL::Cm) | pBR322.Ptet.DsbA- IL-15 |
| SYN3415 | PAL (PAL::Cm) | pBR322.Ptet.Adhesin- IL-15 |

TABLE 43
Strain descriptions

| ID | Genotype | Construct |
|---|---|---|
| SYN3525 | | pBR322.Ptet PpiA |
| | | (ECOLIN_18620)-IL-15-Sushi |
| SYN3524 | PAL (PAL::Cm) | pBR322.Ptet.phoA-IL-15-Sushi |
| SYN3523 | PAL (PAL::Cm) | pBR322.Ptet.PelB-IL-15-Sushi |
| SYN3522 | PAL (PAL::Cm) | pBR322.Ptet.OppA-IL-15-Sushi |
| SYN3521 | PAL (PAL::Cm) | pBR322.Ptet.MalE-IL-15-Sushi |
| SYN3520 | PAL (PAL::Cm) | pBR322.Ptet.HdeB-IL-15-Sushi |
| SYN3519 | PAL (PAL::Cm) | pBR322.Ptet.GspD-IL-15-Sushi |
| SYN3518 | PAL (PAL::Cm) | pBR322.Ptet.Gltl- IL-15-Sushi |
| SYN3517 | PAL (PAL::Cm) | pBR322.Ptet.DsbA- IL-15-Sushi |
| SYN3516 | PAL (PAL::Cm) | pBR322.Ptet.Adhesin- IL-15-Sushi |

[0808] Production of and In Vitro Quantification of IL-15 by SYN3525

[0809] To assay for production of IL-15 and/or to quantify bioactivity, cultures were grown and induced, then supernatants were harvested and quantified by ELISA. Prior to assay date, both the negative control strain (SYN1557) and the IL-15-sushi domain producing strains (SYN3516—SYN3525) were struck onto LB agar plates and grown at 37° C. with the appropriate antibiotics. A 2 mL starter culture of 2YT broth was inoculated with a single colony for every 50 mL of induced culture to be grown, allowed to grow at 37° C. for 2 hours, spun down at 8000×g for 10 minutes, and cells were resuspended in 2YT media of the original volume with the anhydrotetracycline (aTc) inducer (100 ng/mL). These cultures were placed at 30° C. with shaking for 4 hours to induce IL-15-sushi fusion protein production. Next, cultures were removed from the incubator and centrifuged at 20,000×g for 10 minutes to pellet all cells and the supernatants were passed through a 0.22 μm filter to yield sterilized supernatants. These supernatants were used in cell-based assays.

[0810] To evaluate the production of IL-15 fusions by the plasmid library, cultures of SYN1557 and the IL-15—producing library were induced and harvested in duplicate. These supernatants were serially-diluted and quantified using an IL-15 ELISA Kit (Human IL-15 Quantikine ELISA Kit—D1500, R&D Systems, Minneapolis, MN). The data from screening our secretion library displayed in FIG. 32 shows maximal production from SYN3525, which contains the PpiA secretion signal from E. coli as the leader peptide. SYN1557 supernatants showed no cross-reactivity in the ELISA (data not shown).

[0811] To further evaluate the production of IL-15 from SYN3525, the strain was grown and induced in baffled flasks to generate maximum yield. From the filtered supernatants of SYN3525, samples of SYN1557 and SYN3525 were diluted in triplicate and run on an ELISA Kit (Human IL-15 Quantikine ELISA Kit—D1500, R&D Systems, Minneapolis, MN). The results of these analyses are shown in Table 44. The results showed that under maximal induction conditions the SYN3525 supernatant contained between 733-795 ng/mL of material that reacted positively in the IL-15 ELISA assay. In contrast, the SYN1557 supernatants had undetectable levels (not shown).

TABLE 44
SYN3525 supernatant results from three different ELISA runs.

| SYN3525 | IL-15 (ng/ml) |
|---|---|
| Run 1 | 795.23 |
| Run 2 | 733.75 |
| Run 3 | 792.80 |
| AVERAGE | 773.93 |
| SEM (n = 3) | 20.10 |

### Example 26. GLP-2-IL-22 Fusion Proteins

[0812] GLP-2-IL-22 fusion protein constructs were generated according to the methods described above. Non-limiting examples of GLP-2-IL-22 fusion sequences include GLP-2-IL-22 fusion (SEQ ID NO: 1240; SEQ ID NO: 1243); 19410-GLP-2-IL-22 fusion (SEQ ID NO: 1241; SEQ ID NO: 1244); and Tort-GLP-2-IL-22 fusion (SEQ ID NO: 1242; SEQ ID NO: 1245).

### Example 27. GLP-2-diIL-10 Fusion Proteins

[0813] GLP-2-diIL-10 fusion protein constructs were generated according to the methods described above. Non-limiting examples of GLP-2-diIL-10 fusion sequences include GLP-2-diIL-10 fusion (SEQ ID NO: 1246; SEQ ID NO: 1249); 19410-GLP-2-diIL-10 fusion (SEQ ID NO: 1247; SEQ ID NO: 1250) and Tort-GLP-2-diIL-10 fusion (SEQ ID NO:1248; SEQ ID NO: 1251).

### Example 28. Construction of a Dimerized IL-12 for Secretion

[0814] Strain Engineering:

[0815] To generate an engineered E. coli Nissle strain capable of secreting biologically active Interleukin 12 (IL-12) heterodimer, a construct was generated in which two interleukin-12 monomer subunits (IL-12A (p35) and IL-12B (p40)) were covalently linked by a linker.

[0816] To facilitate the dimerization of recombinant human IL-12 protein produced from E. coli Nissle, a 15 amino acid linker of ‘GGGGSGGGGSGGGGS’(SEQ ID NO: 1063) was inserted between two monomer subunits (IL-12A (p35) and IL-12B (p40) to produce a forced dimer human IL-12 (diIL-12) fusion protein, and the sequence was codon-optimized.

[0817] To promote translocation to the periplasm, secretion tags were added to the N-terminus of the diIL-12 fusion protein. The DNA sequence containing the elements of the inducible Ptet promoter, ribosome binding site, diIL-12 coding sequence and other necessary linkers were synthesized by IDT Technologies and subsequently cloned into a high copy number plasmid vector. The plasmid was transformed into SYN1555, SYN1556, SYN1557 or SYN1625 (comprising the nlpl, tolA, PAL, or lpp deletion respectively to create the diffusible membrane phenotype) to create the dimerized human IL-12 (diIL-12) secretion strains. Non-limiting IL-12 construct polynucleotide sequences include construct comprising secretion tag 19410—human IL-12 (p35)—Linker (15aa)— human IL-12 (p40) (SEQ ID NO: 1252); construct comprising secretion tag dsba—human IL-12 (p35)—Linker (15aa)—human IL-12 (p40) (SEQ ID NO: 1253); construct comprising secretion tag phoA—human IL-12 (p35)—Linker (15aa)—human IL-12 (p40) (SEQ ID NO: 1254); construct comprising secretion tag tolB—human IL-12 (p35)—Linker (15aa)—human IL-12 (p40) (SEQ ID NO: 1255); construct comprising secretion tag malE—human IL-12 (p35)—Linker (15aa)—human IL-12 (p40) (SEQ ID NO: 1256); construct comprising secretion tag mglB—human IL-12 (p35)—Linker (15aa)—human IL-12 (p40) (SEQ ID NO: 1257); construct comprising secretion tag ompF—human IL-12 (p35)—Linker (15aa)—human IL-12 (p40) (SEQ ID NO: 1258); construct comprising secretion tag ompA—human IL-12 (p35)—Linker (15aa)—human IL-12 (p40) (SEQ ID NO: 1259); construct comprising secretion tag tort—human IL-12 (p35)—Linker (15aa)—human IL-12 (p40) (SEQ ID NO: 1260); construct comprising secretion tag lamB—human IL-12 (p35)—Linker (15aa)—human IL-12 (p40) (SEQ ID NO: 1261); construct comprising secretion tag pelB—human IL-12 (p35)—Linker (15aa)—human IL-12 (p40) (SEQ ID NO: 1262); 19410 Secretion Tag (SEQ ID NO: 1117); dsba Secretion Tag (SEQ ID NO: 1118); phoA Secretion Tag(SEQ ID NO: 1119); tolB Secretion Tag(SEQ ID NO: 1120); malE Secretion Tag(SEQ ID NO: 1121); mglB Secretion Tag(SEQ ID NO: 1122); ompF Secretion Tag(SEQ ID NO: 1123); ompA Secretion Tag(SEQ ID NO: 1115); tort Secretion Tag(SEQ ID NO: 1124); lamB Secretion Tag(SEQ ID NO: 1125); pelB Secretion Tag(SEQ ID NO: 1126); and human IL-12 (p35)—Linker (15aa)—human IL-12 (p40) (SEQ ID NO: 1263).

[0818] Non-limiting IL-12 construct polypeptide sequences include construct comprising secretion tag 19410—human IL-12 (p35)—Linker (15aa)—human IL-12 (p40) (includes C terminal V5 and HIS tag and FLAG tag located at C terminus of secretion tag) (SEQ ID NO: 1264); construct comprising secretion tag dsba—human IL-12 (p35)—Linker (15aa)—human IL-12 (p40) (includes C terminal V5 and HIS tag and FLAG tag located at C terminus of secretion tag) (SEQ ID NO: 1265); construct comprising secretion tag phoA—human IL-12 (p35)—Linker (15aa)—human IL-12 (p40) (includes C terminal V5 and HIS tag and FLAG tag located at C terminus of secretion tag) (SEQ ID NO: 1266); construct comprising secretion tag tolB—human IL-12 (p35)—Linker (15aa)—human IL-12 (p40) (includes C terminal V5 and HIS tag and FLAG tag located at C terminus of secretion tag) (SEQ ID NO: 1267); construct comprising secretion tag malE—human IL-12 (p35)—Linker (15aa)—human IL-12 (p40) (includes C terminal V5 and HIS tag and FLAG tag located at C terminus of secretion tag) (SEQ ID NO: 1268); construct comprising secretion tag mg1B—human IL-12 (p35)—Linker (15aa)—human IL-12 (p40) (includes C terminal V5 and HIS tag and FLAG tag located at C terminus of secretion tag) (SEQ ID NO: 1269); construct comprising secretion tag ompF— human IL-12 (p35)—Linker (15aa)—human IL-12 (p40)(includes C terminal V5 and HIS tag and FLAG tag located at C terminus of secretion tag) (SEQ ID NO: 1270); construct comprising secretion tag ompA—human IL-12 (p35)—Linker (15aa)—human IL-12 (p40)(includes C terminal V5 and HIS tag and FLAG tag located at C terminus of secretion tag) (SEQ ID NO: 1271); construct comprising secretion tag tort—human IL-12 (p35)—Linker (15aa)—human IL-12 (p40)(includes C terminal V5 and HIS tag and FLAG tag located at C terminus of secretion tag) (SEQ ID NO: 1272); construct comprising secretion tag lamB—human IL-12 (p35)—Linker (15aa)—human IL-12 (p40)(includes C terminal V5 and HIS tag and FLAG tag located at C terminus of secretion tag) (SEQ ID NO: 1273); construct comprising secretion tag pelB—human IL-12 (p35)—Linker (15aa)—human IL-12 (p40)(includes C terminal V5 and HIS tag and FLAG tag located at C terminus of secretion tag) (SEQ ID NO: 12074); 19410 Secretion Tag (SEQ ID NO: 1090); dsba Secretion Tag (SEQ ID NO: 1092); phoA Secretion Tag (SEQ ID NO: 1097); tolB Secretion Tag (SEQ ID NO: 1109); malE Secretion Tag (SEQ ID NO: 1094); mglB Secretion Tag (SEQ ID NO: 1127); ompF Secretion Tag (SEQ ID NO: 1128); ompA Secretion Tag (SEQ ID NO: 1111); tort Secretion Tag (SEQ ID NO: 1110); lamB Secretion Tag (SEQ ID NO: 1129); pelB Secretion Tag (SEQ ID NO: 1096) and human IL-12 (p35)— Linker (15aa)—human IL-12 (p40) (SEQ ID NO: 1275).

[0819] Production of dilL-12 by SYN3466 to SYN3505 for In vitro Assays

[0820] To assay for production of IL-12 and/or to quantify bioactivity, cultures were grown and induced, then supernatants were harvested and quantified via ELISA, as follows using shaker plate. Both the negative control strain (SYN1555, SYN1556, SYN1557 or SYN1625) and the diIL-12-producing strain (SYN3466 to SYN3505) were struck onto LB agar plates and grown at 37° C. with chloramphenicol, or chloramphenicol and carbenicillin, respectively. After overnight growth, an individual colony was picked and used to inoculate a 4 mL starter culture of 2YT broth for future shaker plate to be grown. The starter cultures were inoculated with the same antibiotics used in the agar plates. When the starter culture reached saturation, the culture was back-diluted 1:25 into a new shaker plate of 2YT with appropriate antibiotics. This starter culture was allowed to grow at 37° C. for 2 hours to an OD600=˜0.8-1. The culture was then induced by adding aTc inducer (100 microg/mL). These induced cultures were incubated at 30° C. with shaking for 4 hours to promote IL-12 production.

[0821] When the production phase was complete, the shaker plate of cultures was removed from the incubator and centrifuged at 20000×g for 10 minutes to pellet all cells. The supernatants were kept for ELISA analysis.

[0822] Quantification of dilL-12 in Strain supernatants by ELISA

[0823] To evaluate the amounts of dilL-12 in the supernatants, samples were assayed using a Human IL-12 p70 Quantikine ELISA Kit from R&D systems. The results of these analyses are shown in Table 45. The results showed that the supernatants contained between 17 and 309 pg/mL of material that reacted positively in the IL-12 ELISA assay. In contrast, the SYN1557 supernatants had undetectable levels.

TABLE 45
Strain supernatant results from ELISA analysis (pg/mL).

| Signal Peptides | | | | | | |
|---|---|---|---|---|---|---|
| Host strain | Vector | 19410 | pelB | tort | LamB | OmpF |
| Nissle delta nlpI::CmR | 15.1 | 130.7 | 61.4 | 255.6 | 81.6 | 17.0 |
| Nissle delta tolA::CmR | 12.8 | 47.7 | 93.0 | 205.3 | 189.8 | 220.2 |
| Nissle delta PAL::CmR | 10.2 | 142.3 | 31.2 | 266.7 | 167.0 | 62.8 |
| Nissle delta lpp::CmR | 10.5 | 233.7 | 57.9 | 278.6 | 107.2 | 128.4 |

| Signal Peptides | | | | | | |
|---|---|---|---|---|---|---|
| Host strain | OmpF | mglB | malE | tolB | phoA | dsbA |
| Nissle delta nlpI::CmR | 17.0 | 194.4 | 224.7 | 234.2 | 241.9 | 99.3 |
| Nissle delta tolA::CmR | 220.2 | 227.0 | 194.4 | 187.0 | 309.1 | 146.0 |
| Nissle delta PAL::CmR | 62.8 | 218.4 | 256.5 | 250.0 | 203.7 | 237.0 |
| Nissle delta lpp::CmR | 128.4 | 203.3 | 242.3 | 197.2 | 250.7 | 101.9 |

### Example 29. An engineered IL-15-producing E. coli Nissle strain

[0824] Strain Engineering

[0825] To generate an engineered E. coli Nissle strain capable of secreting biologically active interleukin 15 (IL-15) a fusion protein was constructed, in which IL-15 is fused to the minimal region of IL-15Rα required for the formation of a functional receptor, which is known as Sushi domain IL-15 and IL-15Rα form functional complexes, which stimulate cell signaling, and activation and proliferation of neighboring lymphocytes expressing IL-2R13 and yc in a process called trans-presentation (see, e.g., Ochoa et al., High-density lipoproteins delivering interleukin-15; Oncoimmunology. 2013 Apr. 1; 2(4): e23410). The biological activity of IL-15 is greatly improved by direct fusion with the sushi domain of IL-15Rα by mimicing trans-presentation of IL-15 by cell-associated IL-15Rα (Mortier et al., Soluble interleukin-15 receptor alpha (IL-15R alpha)-sushi as a selective and potent agonist of IL-15 action through IL-15R betagamma. Hyperagonist IL-15×IL ISR alpha fusion proteins, I Diol Chem 2006; 281:1612-9).

[0826] To produce the recombinant IL-15-Sushi fusion protein, IL-15 monomer was fused to the C-terminus of the sushi domain linked by a 20 amino acid linker. To promote translocation to the periplasm, 19410, tort, or pelB secretion tag was added to the N-terminus of IL-15-Sushi fusion protein. The DNA sequence containing the Ptet promoter, RBS, coding sequence for IL-15-Sushi and other necessary linkers were synthesized by IDT Technologies and subsequently cloned into a high copy number plasmid vector provided by IDT Technologies under the control of a tet-inducible promoter. The plasmids were transformed into SYN1557 (delta PAL, diffusible outer membrane (DOM) phenotype) or SYN94 (no PAL deletion E. coli Nissle strain) to create the IL-15-Sushi secretion strains SYN3458 to SYN3463.

[0827] Non-limiting IL-15 construct nucleotide and polypeptide sequences include human IL-15Rα sushi domain (SEQ ID NOS: 1209 and 1214); construct comprising 19410 secretion tag— Sushi—linker—human IL-15 (SEQ ID NOS: 1282 and 1276); construct comprising tort secretion tag—Sushi—linker—human IL-15 (SEQ ID NOS: 1283 and 1277); construct comprising pelB secretion tag—Sushi—linker—human IL-15 (SEQ ID NOS: 1284 and 1278); Sushi—linker—human IL-15 (SEQ ID NOS: 1285 and 1279); human IL-15 (SEQ ID NOS: 1134 and 1217); linker (SEQ ID NO: 1280). Production of IL-15 by SYN3458 to SYN3463 for in vitro Assays

[0828] To assay for production of IL-15 and/or to quantify bioactivity, cultures were grown and induced, then supernatants were harvested and quantified by ELISA. Prior to assay date, both the negative control strain (SYN1557) and the IL-15-sushi domain producing strain SYN3458 to SYN3463 were struck onto LB agar plates and grown at 37° C. with the appropriate antibiotics. A 2 mL starter culture of 2YT broth was inoculated with a single colony for every 50 mL of induced culture to be grown, allowed to grow at 37° C. for 2 hours, spun down at 8000×g for 10 minutes, and cells were resuspended in 2YT media of the original volume with the anhydrotetracycline (aTc) inducer (100 ug/mL). These cultures were placed at 30° C. with shaking for 4 hours to induce IL-15-sushi fusion protein production. Next, cultures were removed from the incubator and centrifuged at 20,000×g for 10 minutes to pellet all cells and the supernatants were passed through a 0.22 μm filter to yield sterilized supernatants. These supernatants were used in cell-based assays.

[0829] Quantification of IL-15 in SYN3458 to SYN3463 Supernatants by ELISA

[0830] To evaluate the production of IL-15 in the filtered supernatants, samples of SYN1557 and SYN3458 to SYN3463 were diluted in triplicate and run on an Human IL-15 Quantikine ELISA Kit (Ra&D Systems). The results of these analyses are shown in Table 46. The results showed that the SYN3458 to SYN3463 supernatant contained between 4 and 275 ng/mL of material that reacted positively in the IL-15 ELISA assay. In contrast, the SYN94 and SYN1557 supernatants had undetectable levels (not shown).

TABLE 46
Supernatant results from three different ELISA runs.

| final | host | | |
|---|---|---|---|
| strain | strain | plasmid | ng/ml |
| SYN3460 | SYN1557 | ptet-pelBss-hIL15-SUSHI-fusion | 275 |
| SYN3461 | SYN1557 | ptet-19410ss-hIL15-SUSHI-fusion | 166 |
| SYN3458 | SYN1557 | ptet-tortss-hIL15-SUSHI-fusion | 59 |
| SYN3459 | SYN94 | ptet-tortss-hIL15-SUSHI-fusion | 78 |
| SYN3462 | SYN94 | ptet-pelBss-hIL15-SUSHI-fusion | 4 |
| SYN3463 | SYN94 | ptet-19410ss-hIL15-SUSHI-fusion | 72 |

### Example 30. CXCL10 Secretion

[0831] To produce the recombinant CXCL10 chemokine, a synthetic construct was devised. The secreted/soluble form of the CXCL10 protein was codon optimized for expression in E. coli and ordered from IDT Technologies as a double-stranded DNA fragment. To promote translocation to the periplasm, the CXCL10 soluble protein was cloned into a 10-member plasmid library. Once the DNA was received it was digested and ligated into the 10-member plasmid library using standard cloning procedures. Each member of the plasmid library contains a low-copy plasmid backbone and a Ptet promoter that drives expression of variable optimized ribosome-binding sites and secretion tags. Once the CXCL10 was cloned C-terminally of the secretion tags, the plasmids were transformed into SYN1557 (OPAL, diffusible outer membrane (DOM) phenotype) to create the CXCL10 secretion strains, SYN3404 and SYN3406-SYN3414. Non-limiting examples of construct sequences include CXCL10 (SEQ ID NO: 1291 and 1138) and CXCL10 plus Tag of interest (SEQ ID NO: 1286 and 1150)

TABLE 47
Strain Descriptions

| ID | Genotype | Construct |
|---|---|---|
| SYN3414 | PAL (PAL::Cm) | p15a.Ptet.PpiA-CXCL10 |
| SYN3413 | PAL (PAL::Cm) | p15a.Ptet.phoA-CXCL10 |
| SYN3412 | PAL (PAL::Cm) | p15a.Ptet.PelB-CXCL10 |
| SYN3411 | PAL (PAL::Cm) | p15a.Ptet.OppA-CXCL10 |
| SYN3410 | PAL (PAL::Cm) | p15a.Ptet.MalE-CXCL10 |
| SYN3409 | PAL (PAL::Cm) | p15a.Ptet.HdeB-CXCL10 |
| SYN3408 | PAL (PAL::Cm) | p15a.Ptet.GspD-CXCL10 |
| SYN3407 | PAL (PAL::Cm) | p15a.Ptet.Gltl-CXCL10 |
| SYN3406 | PAL (PAL::Cm) | p15a.Ptet.DsbA-CXCL10 |
| SYN3404 | PAL (PAL::Cm) | p15a.Ptet.Adhesin-CXCL10 |

[0832] To assay for production of CXCL10 and/or to quantify bioactivity, cultures were grown and induced, then supernatants were harvested and quantified by ELISA. Prior to assay date, both the negative control strain (SYN1557) and the CXCL10-producing strains (SYN3404—SYN3414) were struck onto LB agar plates and grown at 37° C. with the appropriate antibiotics. A 2 mL starter culture of 2YT broth was inoculated with a single colony for every 50 mL of induced culture to be grown, allowed to grow at 37° C. for 2 hours, spun down at 8000×g for 10 minutes, and cells were resuspended in 2YT media of the original volume with the anhydrotetracycline (aTc) inducer (100 ng/mL). These cultures were placed at 30° C. with shaking for 4 hours to induce CXCL10 protein production. Next, cultures were removed from the incubator and centrifuged at 20,000×g for 10 minutes to pellet all cells and the supernatants were passed through a 0.22 μm filter to yield sterilized supernatants. These supernatants were used in cell-based assays.

[0833] To evaluate the production of CXCL10 by the plasmid library, cultures of SYN1557 and the CXCL10—producing library were induced and harvested in duplicate. These supernatants were serially-diluted and quantified using a CXCL10 ELISA Kit (Human CXCL10/IP-10 Quantikine ELISA Kit—DIP100, R&D Systems, Minneapolis, MN). The data from screening our secretion library displayed in FIG. 31 shows maximal production from SYN3413, which contains the PhoA secretion signal from E. coli as the leader peptide. SYN1557 supernatants showed no cross-reactivity in the ELISA (data not shown).

[0834] To further evaluate the production of CXCL10 from SYN3413, the strain was grown and induced in baffled flasks to generate maximum yield. From the filtered supernatants of SYN3413, samples of SYN1557 and SYN3413 were diluted in triplicate and run on an ELISA Kit (Human CXCL10/IP-10 Quantikine ELISA Kit—DIP100, R&D Systems, Minneapolis, MN). The results of these analyses are shown in Table 48. The results showed that under maximal induction conditions the SYN3413 supernatant contained between 199-232 ng/mL of material that reacted positively in the CXCL10 ELISA assay. In contrast, the SYN1557 supernatants had undetectable levels (not shown).

TABLE 48
Concentration of Secreted hCXCL10 from triplicate SYN3414

| SYN3414 | CXCL10 (ng/ml) |
|---|---|
| Run 1 | 199.71 |
| Run 2 | 231.96 |
| Run 3 | 232.16 |
| AVERAGE | 221.28 |
| SEM (n = 3) | 10.78 |

[0835] Functional Assay for CXCL10

[0836] To determine whether CXCL10 secreted from any of the strains described above is functional, a Chemotaxis Assay is performed, essentially as described in Mikucki et al. (Mikucki, et al., Nat Commun. 2015; 6: 7458, the contents of which is herein incorporated by reference in its entirety).

[0837] Briefly, cell trace labeled naïve (or expanded) human CD8+ T cells are transferred into 24-well transwell plate (5 uM pore) with T cells on top (5×105 cells) and rCXCL10/supernatants on bottom, in the presence or absence of PTX or anti-CXCL10. Cells are incubated for 3 hrs, and migrated cells are counted by flow cytometry. Alternatively, phosphoAKT is measured by flow, western or ELISA.

### Example 31. IL-22 Secretion

[0838] hIL-22 Production and Quantification In Vitro

[0839] To assay for production of hIL-22, bacteria were inoculated into fresh flasks of 20 ml 2YT medium at OD600=0.25. These flasks were placed at 37° C. and grown for 5 hours shaking. The cultures were harvested by centrifugation at 12.5K×g for 5 minutes. The supernatants of the cultures were removed from the cell pellet and filtered through a 0.22 μm filter to separate any remaining bacteria from the supernatant. To evaluate the production of IL-22 in the filtered supernatants, samples were diluted in triplicate and analyzed by Human IL-22 Quantikine® ELISA Kit (#D2200, Fisher Scientific) according the manufacturer's instructions (FIG. 36).

[0840] hIL-22 STAT3 Activation In Vitro

[0841] IL-22-induced phosphorylation of STAT3 was determined using the PathScan Phospho-STAT3 (Tyr705) Sandwich ELISA Kit (#7300, Cell Signalling Technology). Briefly, Colo205 cells (#CCL-222, ATCC) were counted and serum starved for 4 hrs with RPMI1640 in ultra-low binding T75 flasks (#3814, Corning). Cells were collected, spun at 1500 rpm, and resuspended at 1.25×10′ cells/mL. 50 uL of cells were then added to a prepared 96-well v-bottom plate (final concentration of 6.25×10 5 cells/well) containing 50 uL of 2× of recombinant IL-22 (rIL22, #782-IL-010, R&D,) or bacterial supernatants (starting with undiluted supernatant) titrated down in 3-fold dilutions. Cells were then incubated for 15 minutes at 37° C. to allow for induction of STAT3 phosphorylation. After 15 minutes, the plate was placed on ice and 175 uL of 1.5 mM sodium vanadate was added to all wells. Plates were then spun at 1500 rpm at 4° C. for 5 minutes. 165 uL of 1× lysis buffer was added to each well, and the plate was incubated on ice and then spun for 10 minutes at 400 rpm to clarify the lysates. Lysates from the different treatment groups were then added to phospho-STAT3 ELISA plates (#7300, Cell Signalling Technology) and ELISAs were performed as per the manufacturer's instructions (FIG. 36).

[0842] Characterization of hIL-22-Secreting Strain In Vivo in DSS-Treated Mice

[0843] For quantitation of hIL-22 production and Reg3β and Birc5 mRNA expression by SYN4878 (SYN001 strain with PAL-KO-cmR and p15A-Pfnr-phoA-IL22-KanR), naïve C57BL6 mice were randomized into the different treatment groups (10 mice/group) by weight and put on 3% DSS drinking water for 7 days. After day 7, DSS water was removed and substituted with normal water. At day 8, mice were gavaged with 200 uL either of ˜1.25×10¹⁰ CFUs of SYN1557 or hIL-22 secreting stain SYN4878. Six hours after dose, mice were manually restrained and fresh fecal pellets were collected from the mouse rectal area using forceps and placed into individual pre-weighed bead-filled tubes (beadBug, #Z763829, Sigma). Mice were then euthanized by CO₂ asphyxiation and colon tissue were collected for analysis into individual pre-weighed bead-filled tubes. Feces and colon samples were processed and analyzed as described below.

[0844] Characterization of hIL-22-Secreting Strain In Vivo in DSS-Treated Mice after 24 h Colonization

[0845] For quantitation of hIL-22 production and Reg3β and Birc5 mRNA expression by SYN4878 with streptomycin resistance (SYN6967), naïve C57BL6 mice were randomized into the different treatment groups (10 mice/group) by weight and put on 3% DSS drinking water for 7 days. After day 7, DSS water was removed and substituted with Streptomycin water (5 g/L). At day 8, mice were gavaged with 200 uL either of 2×10⁹ CFUs of SYN5103 (control) or hIL-22 secreting stain SYN6967. Twenty-four hours after dose, mice were manually restrained and fresh fecal pellets were collected from the mouse rectal area using forceps and placed into individual pre-weighed bead-filled tubes (beadBug, #Z763829, Sigma). Mice were then euthanized by CO₂ asphyxiation and colon tissue were collected for analysis into individual pre-weighed bead-filled tubes or in 500 uL of RNALater stabilization solution (#AM7021, Fisher Scientific). Feces, colon tissue and RNA samples were processed and analyzed as described below.

[0846] The data demonstrated that oral administration of strains leads to significant and reproducible levels of human cytokines in feces and tissue after single oral dose or prolong exposure (FIG. 37). Significant increases in colonic biomarker mRNAs in tissue further suggest a production of biologically active protein.

[0847] Kinetics of SYN4878 hIL-22 Production in DSS-Pretreated Mice

[0848] For kinetics of hIL-22 production by SYN4878, naïve C57BL6 mice were randomized into the different treatment groups (10 mice/group) by weight and put on 3% DSS drinking water for 7 days starting from day 0. After day 7, DSS water was removed and substituted with normal water. At day −3, 2, 5 and 10, mice were gavaged with 200 uL either of ˜1.25×10¹⁰ CFUs of SYN1557 or hIL-22 secreting stain SYN4878. Six hours after dose, mice were manually restrained and fresh fecal pellets were collected from the mouse rectal area using forceps and placed into individual pre-weighed bead-filled tubes (beadBug, #Z763829, Sigma). Feces were processed and analyzed as described below. As shown in FIG. 38, a significant level of IL-22 protein was detected in fecal samples starting on day 2, and the level continued to rise on day 5.

[0849] Bacterial Enumeration by CFU Counting

[0850] To measure CFUs, homogenized samples were plated in a 10×series of 8 dilutions, e.g. the first sample dilution was made as 20 ul of homogenate into 180 ul of sterile PBS, then 10 uL of sample further diluted into 90 uL of sterile PBS, and this was repeated 7 times in a 96 well plate. Then, 10 uL of each dilution was pipetted onto appropriate LB plate with following antibiotics for the strains: SYN1557—Chloramphenicol 30 ug/ml, SYN4878: Kanamycin A 50 ug/ml. The plate was tilted to allow the sample dilutions to streak down the plate. Plates were allowed to dry and then incubated overnight at 37° C. The following day colonies were manually counted from a streak containing >30 individual colonies. The multiplying factor for the first streak of 1:10 diluted homogenate sample was considered as 1×10³ CFU/ml and 10-fold increases were added for each dilution after that. With an assumption that the tube content density ρ=1 g/ml, total number of live bacteria (CFUs) per feces was calculated as N=plate CFU/ml×[0.5 (PBS volume)+(dry weight of the tube content)].

[0851] Animal Sample Collection and Processing

[0852] For all studies, at the study-specific specified time points defined for each study (see above) animal samples were collected and processed as follows:

[0853] For fecal CFU harvest, prior to euthanization mice were manually restrained and fresh fecal pellets were collected from the rectal area using forceps, placed into individual pre-weighed bead-filled tubes (beadBug, #Z763829, Sigma) containing 0.5 mL of cold, sterile PBS. Samples were stored on ice until post-collection tube weight was noted. Then tube content was homogenized with the FastPrep 24 benchtop homogenizer at the speed of 4 m/s for 40 seconds and directly used for enumeration of CFUs.

[0854] For fecal or colon tissue preparation for hIL-22 ELISA, feces or colon tissue were harvested and placed into individual pre-weighed bead-filled tubes (beadBug, #Z763829, Sigma) containing 0.5 mL of cold, sterile PBS+15 ul of Halt Protease Inhibitor Cocktail (100×) with 5 uL of EDTA (100×) (#78429, Thermo Fisher Scientific)+0.1% Tween-20 were added to each tube. Tube content was homogenized with the FastPrep 24 benchtop homogenizer at the speed of 4 m/s for 20 seconds The tube content was spun down (15000 rpm, 20 min at 4° C.) and supernatants were aliquoted in 96 well plate for the hIL-22 ELISA analysis.

[0855] For colon tissue collection for RNA isolation, colon tissue was harvested, organ content was gently squeezed out and fat tissue was carefully removed. 2 cm of tissue were collected for analysis in 500 uL of RNALater stabilization solution (#AM7021, Fisher Scientific). Tissue was stored in RNALater at 4° C. for the short period of time until RNA was isolated and analyzed as described below.

[0856] hIL-22 ELISA Analysis of Fecal Samples

[0857] For ELISA analysis of hIL-22 in fecal samples, processed fecal supernatants were loaded onto the hIL-22 ELISA assay plate (Human IL-22 Quantikine® ELISA Kit, #D2200, Fisher Scientific). ELISA assays were run according to the manufacturer's instructions.

[0858] RNA Isolation and cDNA Preparation

[0859] For RNA isolation with RNeasy Mini Kit (#74106, Qiagen), tissue samples were removed from RNALater and placed into individual bead-filled tubes (beadBug, #Z763829, Sigma) containing 0.6 mL of buffer RLT with 1% of β-mercaptoethanol. Tissues were homogenized twice with FastPrep 24 benchtop homogenizer at the speed of 4.5 m/s for 30 seconds. Tissue lysate was centrifuged for 3 min at full speed and supernatant was used for further RNA purification according to the manufacturer's protocol.

[0860] For high throughput RNA isolation from kinetic studies, mRNA was isolated with TurboCapture 96 mRNA Kit (#72251, Qiagen). Tissue samples were removed from RNALater and placed into individual bead-filled tubes (beadBug, #Z763829, Sigma) containing 200 to 300 uL of TCL buffer with 1% of β-mercaptoethanol. Tissue was homogenized twice with a FastPrep 24 benchtop homogenizer at the speed of 4.5 m/s for 30 seconds. Tissue lysate was spun down (5 min, 4° C., 15000 rpm) and 80 ul of the lysate was transferred onto mRNA isolation plate. Plate was used for further RNA purification according to the manufacturer's protocol.

[0861] For cDNA preparation, cDNA was synthesized from isolated RNA using High-Capacity cDNA Reverse Transcription Kit with RNase Inhibitor (#4374966, Thermo Fisher Scientific) according to manufacturer's protocol. For 20 ul reaction, 2×RT master mix was prepared as follows: 10×RT Buffer 2 uL, 25×dNTP mix 0.8 uL, 10×Random primers 2 uL, MultiScribe RT (50U/ul) 1 uL, RNAase inhibitor 1 uL, Nuclease-free H₂O 3.2 uL, and mRNA 10 uL. PCR plate was run 10 min at 25° C. and 120 min at 37° C. in T100 Thermal Cycler (Bio-Rad).

[0862] qPCR Analysis of Gene Expression

[0863] For the quantification of Reg3β (Mm00440616_g1 Taqman probe) and Birc5 (Mm00599749_g1 Taqman probe) mRNA expression, a 20 uL qPCR reaction was performed using Taqman assay probes and TaqMan® Fast Advanced Master Mix (#4444557, Thermo Fisher Scientific) and containing the following components: 2× Master Mix 10 uL, Taqman gene probe (20×) 1 uL (FAM-labeled, #4331182, Thermo Fisher Scientific), Taqman mouse β-actin (endogenous control)* probe (20×) 1 uL (VIC-labeled, #4352341E, Thermo Fisher Scientific), nuclease-free H₂O 4 uL, cDNA 4 uL. Reaction was run in MicroAmp™ Fast Optical 96-Well Reaction Plate (#4346907, Thermo Fisher Scientific) 2 min at 50C, 20 sec at 95C and 40 cycles (1 sec—95 C, 20 sec—60 C) in StepOnePlus Real-Time PCR System, Applied Biosystems. Gene expression was analyzed by using comparative C_{T} Method (ΔΔ_{C}T Method).

[0864] Statistical Analysis

[0865] Prism7.0c software (GraphPad Software, San Diego, CA) was used for all statistical analysis. In vivo kinetics was analyzed using One- or Two-way ANOVA followed-up by Tukey's post-analysis.

### Example 32. IL-2 Secretion

[0866] To determine whether the hIL-2 expressed by engineered bacteria is secreted, the concentration of IL-2 in the bacterial supernatant from engineered strains comprising hIL-2 secretion constructs/strains was measured. The strains carrying secretion constructs were in a wild type Nissle or a PAL deletion (PAL::Cm) background. All strains comprise either a plasmid expressing hIL-2 with a HdeB secretion tag from a tetracycline-inducible promoter (FIG. 39C) or a fnrS promoter, (FIG. 40B). For hIL-2 secretion constructs utilizing an fnrS promoter, a 3-member ribosome binding site library was constructed of low, medium, and high strength ribosome binding sites to determine its effect on resulting hIL-2 secretion.

[0867] E. coli Nissle strains were grown overnight in 2YT medium. Cultures were diluted 1:20 in 2YT in baffled flasks and grown shaking (250 rpm) for 2 hours. For strains with tetracycline-inducible promoters, cultures were concentrated to an optical density of 2.5 in 20 mL cultures, at which time anhydrous tetracycline (ATC) was added to cultures at a concentration of 100 ng/mL to induce expression of hIL-2. For strains utilizing an fnrS promoter, cultures were concentrated to an optical density of 2.5 in 20 mL cultures in a 125 mL non-baffled flasks to induce expression of hIL-2. After 4 hours of induction, cells were spun down, and supernatant was collected. To generate cell free medium, the clarified supernatant was further filtered through a 0.22 micron filter to remove any remaining bacteria and stored at −80C.

[0868] The concentration of hIL-2 in the cell-free medium was measured by hIL-2 ELISA (RnD Systems, Minneapolis, MN), according to manufacturer's instructions. All samples were run in duplicate, and a standard curve was used to calculate secreted levels of hIL-2. Standard curves were generated using recombinant hIL-2. Wild type or PAL::Cm Nissle supernatants were included in the ELISA as negative controls, and no signals were observed. FIGS. 39C and 40B summarize levels of hIL-2 measured in the respective supernatants. The data show that hIL-2 is secreted at various levels from the different bacterial strains.

[0869] The bioactivity of PAL::Cm Nissle secreted hIL-2 in the cell-free medium was measured by IL2 Bioassay (Promega Corp, Madison, WI), according to manufacturer's instruction. All samples were run in triplicate. Supernatant of PAL::Cm Nissle was included as a negative control and a recombinant hIL-2 (PeproTech Cranbury, NJ) was included as a positive control. FIG. 40C demonstrates that hIL-2 secreted is bioactive.

### Example 33. hIL-15Rα-hIL-15 Secretion

[0870] To determine whether the hIL-15Rα-hIL15 expressed by engineered bacteria is secreted, the concentration of hIL-15 in the bacterial supernatant from engineered strains comprising a hIL-15Rα-hIL15 secretion construct was measured from a wild type Nissle or a PAL::Cm Nissle background. Both strains comprise a plasmid expressing hIL-15Rα-hIL15 with a PpiA secretion tag from a tetracycline-inducible promoter.

[0871] E. coli Nissle strains were grown overnight in 2YT medium. Cultures were diluted 1:20 in 2YT and grown shaking (250 rpm) for 2 hours. Cultures were concentrated to an optical density of 2.5 at which time anhydrous tetracycline (ATC) was added to cultures at a concentration of 100 ng/mL to induce expression of hIL-15Rα-hIL15. After 4 hours of induction, cells were spun down, and supernatant was collected. To generate cell free medium, the clarified supernatant was further filtered through a 0.22 micron filter to remove any remaining bacteria and stored at −80C.

[0872] The concentration hIL-15Rα-IL15 in the cell-free medium was measured by hIL-15 ELISA (RnD Systems, Minneapolis, MN), according to manufacturer's instructions. All samples were run in duplicate, and a standard curve was used to calculate secreted levels of hIL-15. Standard curves were generated using recombinant hIL-15. Wild type Nissle or PAL:Cm Nissle was included in the ELISA as a negative control, and no signal was observed. FIG. 41B summarizes levels of hIL-15Rα-IL15 measured in the respective supernatants.

[0873] The bioactivity of EcN secreted hIL-15Rα-hIL-15 in the cell-free medium was measured by IL-2Rbg Bioassay Kit (Promega Corp, Madison, WI), according to manufacturer's instruction. All samples were run in triplicate. Supernatant of PAL:Cm Nissle was included as a negative control and a recombinant hIL-15Rα-hIL15 (Bon Opus Biosciences, Millburn, NJ) was included as a positive control. FIG. 41C summarizes potency of hIL-15Rα-hIL15 measured in the supernatants. The data show that hIL-15Rα-hIL15 secreted is bioactive.

### Example 34: 11-22 Secretion

[0874] Secreted IL-22 was measured from ΔPAL and wild type bacteria with and without expressing IL-22 (FIG. 42B). IL-22 in the supernatant was measured at ng/1E8 over 5 hours.

### Exemplary Sequences

| Description | Sequence |
|---|---|
| hdeB-hIL2 | ATGGGATATAAGATGAACATTTCGTCACTGCGTAAGGC |
| SEQ ID NO: | GTTCATTTTTATGGGCGCGGTTGCCGCGTTATCATTAG |
| | TGAATGCGCAGAGCGCATTGGCTGCTCCCACATCCAGT |
| | TCAACAAAGAAAACACAGCTTCAGCTTGAGCATTTACT |
| | TCTTGATTTGCAGATGATTCTTAATGGTATTAACAACT |
| | ATAAAAATCCAAAACTTACGCGCATGTTGACGTTCAAA |
| | TTTTATATGCCGAAAAAAGCTACTGAATTGAAACATTT |
| | GCAATGTCTGGAAGAGGAATTGAAACCACTTGAGGAGG |
| | TCCTTAATTTAGCACAGAGCAAGAACTTCCATTTACGC |
| | CCGCGCGATTTAATTTCTAATATTAATGTTATCGTGTT |
| | AGAGCTTAAGGGGTCTGAAACTACGTTCATGTGCGAAT |
| | ATGCCGATGAAACGGCTACTATCGTCGAGTTCTTGAAT |
| | CGCTGGATTACGTTCTGTCAGAGCATTATCTCGACCCT |
| | GACCTAA |
| hdeB-hIL2 | MGYKMNISSLRKAFIFMGAVAALSLVNAQSALAAPTSS |
| SEQ ID NO: | STKKTQLQLEHLLLDLQMILNGINNYKNPKLTRMLTFK |
| | FYMPKKATELKHLQCLEEELKPLEEVLNLAQSKNFHLR |
| | PRDLISNINVIVLELKGSETTFMCEYADETATIVEFLN |
| | RWITFCQSIISTLT |

1. A recombinant bacterium comprising a gene sequence encoding one or more effector polypeptides and one or more secretion tags, wherein the gene sequence is operably linked to a directly or indirectly inducible promoter that is not associated with the gene sequence in nature and wherein the encoded effector polypeptide is secreted in a biologically active form.

2. A recombinant bacterium comprising a gene sequence encoding one or more effector polypeptides and one or more secretion tags, wherein the gene sequence is operably linked to a directly or indirectly inducible promoter that is not associated with the gene sequence in nature, wherein the effector polypeptide is secreted in a biologically active form, and wherein the bacterium comprises one or more mutations or deletions in an outer membrane protein selected from a group consisting of lpp, nlP, tolA, and PAL.

3. The recombinant bacterium of claim 1 or 2, wherein the effector is selected from a group consisting of GLP-2, IL-22, IL-10, IL-27, IL-19, IL-20, IL-24, IL-15, IL-2, GMCSF, TNF-alpha, IFN-gamma, CXCL10, CXCL9 and hyaluronidase.

4. The recombinant bacterium of any one of claims 1-3, wherein the secretion tag is selected from a group consisting of PhoA, OmpF, ompA, cvaC, TorA, fdnG, dmsA, PelB, tolB, torT, dsbA, GltI, GspD, HdeB, MalE, mglB, OppA, PpiA, lamb, ECOLIN_05715, ECOLIN_16495, ECOLIN_19410, and ECOLIN_19880 secretion signals.

5. The recombinant bacterium of any one of claims 1-4, wherein the gene sequence further comprises a sequence encoding a polypeptide linker.

6. The recombinant bacterium of claim 4, wherein the secretion tag is linked to the N terminus of the effector polypeptide via a peptide bond or a polypeptide linker.

7. The recombinant bacterium of claim 4, wherein the secretion tag is linked to the C terminus of the effector polypeptide via a peptide bond or a polypeptide linker.

8. The recombinant bacterium of any one of claims 1-7, wherein the secretion tag is cleaved after secretion of the effector polypeptide into the extracellular environment.

9. The recombinant bacterium of any one of claims 1-8, wherein the secretion tag is a PhoA secretion tag.

10. The recombinant bacterium of any one of claims 1-8, wherein the secretion tag is a ECOLIN 19410 secretion tag.

11. The recombinant bacterium of any one of claims 1-8, wherein the secretion tag is a GspD secretion tag.

12. The recombinant bacterium of any one of claims 1-8, wherein the secretion tag is a HdeB secretion tag.

13. The recombinant bacterium of any one of claims 1-8, wherein the secretion tag is a torT secretion tag.

14. The recombinant bacterium of any one of claims 1 and 3-13, further comprising one or more mutations or deletions in an outer membrane protein selected from a group consisting of lpp, nlP, tolA, and PAL.

15. The recombinant bacterium of any one of claims 1-14, wherein the deleted or mutated outer membrane protein is PAL.

16. The recombinant bacterium of any one of claims 1-14, wherein PAL is mutated.

17. The recombinant bacterium of any one of claims 1-14, wherein PAL is completely or partially deleted.

18. The recombinant bacterium of any one of claims 1-17, wherein the gene sequence further encodes a stabilizing polypeptide.

19. The recombinant bacterium of any one of claims 1-18, wherein the effector polypeptide is linked to the stabilizing polypeptide via a peptide linker or a peptide bond.

20. The recombinant bacterium of any one of claims 1-19, wherein the C terminus of the effector polypeptide is linked to the N terminus of the stabilizing polypeptide via a peptide linker or a peptide bond.

21. The recombinant bacterium of any one of claims 1-19, wherein the N terminus of the effector polypeptide is linked to the C terminus of the stabilizing polypeptide via a peptide linker or a peptide bond.

22. The recombinant bacterium of any one of claims 1-21, wherein the stabilizing polypeptide comprises an immunoglobulin Fc polypeptide.

23. The recombinant bacterium of claim 22, wherein the immunoglobulin Fc polypeptide comprises at least a portion of an immunoglobulin heavy chain CH2 constant region.

24. The recombinant bacterium of claim 22, wherein the immunoglobulin Fc polypeptide comprises at least a portion of an immunoglobulin heavy chain CH3 constant region.

25. The recombinant bacterium of claim 22, wherein the immunoglobulin Fc polypeptide comprises at least a portion of an immunoglobulin heavy chain CH1 constant region.

26. The recombinant bacterium of claim 22, wherein the immunoglobulin Fc polypeptide comprises at least a portion of an immunoglobulin variable hinge region.

27. The recombinant bacterium of claim 22, wherein the immunoglobulin Fc polypeptide comprises at least a portion of an immunoglobulin variable hinge region, an immunoglobulin heavy chain CH2 constant region and an immunoglobulin heavy chain CH3 constant region.

28. The recombinant bacterium of any one of claims 22-27, wherein the immunoglobulin Fc polypeptide is a human IgA or human IgG Fc polypeptide.

29. The recombinant bacterium of any one of claim 28, wherein the immunoglobulin Fc polypeptide is a human IgG Fc polypeptide.

30. The recombinant bacterium of any one of claim 28, wherein the immunoglobulin Fc polypeptide is a human IgA Fc polypeptide.

31. The recombinant bacterium of any one of claims 5-30, wherein the linker comprises a glycine rich peptide.

32. The recombinant bacterium of claim 31, wherein the glycine rich peptide comprises the sequence [GlyGlyGlyGlySer]n where n is 1, 2, 3, 4, 5 or 6 (SEQ ID NO: 1053).

33. The recombinant bacterium of claim 31, wherein the glycine rich peptide comprises the sequence GGGGSGGGGSGGGGSGGGGS (SEQ ID NO: 1280).

34. The recombinant bacterium of any one of claims 1-33, wherein the one or more effector polypeptides require multimerization for the effector polypeptide to be active in vivo.

35. The recombinant bacterium of any one of claims 1-34, wherein the one or more effector polypeptides require dimerization for the effector polypeptide to be active in vivo.

36. The recombinant bacterium of any one of claims 1-35, wherein the effector polypeptide is a homodimer.

37. The recombinant bacterium of any one of claims 1-35, wherein the effector polypeptide is a heterodimer.

38. The recombinant bacterium of any one of claims 1-37, wherein the gene sequence encoding the one or more effector polypeptides encodes a first monomer polypeptide and a second monomer polypeptide and wherein the first and second monomer polypeptides are linked to each other via a peptide linker or a peptide bond.

39. The recombinant bacterium of any one of claims 5-28, wherein the linker comprises
(SEQ ID NO: 1054)
GGGGSGGGS.

40. The recombinant bacterium of any one of claims 18-39, wherein the stabilizing polypeptide has the ability to perform an effector function.

41. The recombinant bacterium of any of claims 18-40, wherein the stabilizing polypeptide is able to perform an anti-inflammatory effector function.

42. The recombinant bacterium of any of claims 18-40, wherein the stabilizing polypeptide is able to perform an pro-inflammatory effector function.

43. The recombinant bacterium of any of claims 18-42, wherein the stabilizing polypeptide is a cytokine.

44. The recombinant bacterium of any of claims 18-43, wherein the stabilizing polypeptide is a multimer.

45. The recombinant bacterium of any of claims 18-44, wherein the stabilizing polypeptide is a dimer.

46. The recombinant bacterium of any one of claims 18-45, wherein the gene sequence encoding the stabilizing polypeptide comprises a first monomer and a second monomer, wherein the first and second monomer are linked to one another via a peptide bond or a peptide linker.

47. The recombinant bacterium of any one of claims 1-46, wherein the promoter is induced by exogenous environmental conditions found in a mammalian gut.

48. The recombinant bacterium of claim 47, wherein the promoter is induced under low-oxygen or anaerobic conditions.

49. The recombinant bacterium of claim 48, wherein the promoter is a FNR-responsive promoter, an ANR-responsive promoter, or a DNR-responsive promoter.

50. The recombinant bacterium of claim 49, wherein the promoter is a FNR-responsive promoter.

51. The recombinant bacterium of any of claims 1-50, wherein the promoter is induced by the presence of reactive nitrogen species.

52. The recombinant bacterium of claim 51, wherein the promoter is a NsrR-responsive promoter, NorR-responsive promoter, or a DNR-responsive promoter.

53. The recombinant bacterium of any one of claims 1-52, wherein the promoter is induced by the presence of reactive oxygen species.

54. The recombinant bacterium of any of claim 53, wherein the promoter is a OxyR-responsive promoter, PerR-responsive promoter, OhrR-responsive promoter, SoxR-responsive promoter, or a RosR-responsive promoter.

55. The recombinant bacterium of any one of claims 1-54, wherein the gene sequence is located on a chromosome in the bacterium.

56. The recombinant bacterium of any one of claims 1-54, wherein the gene sequence is located on a plasmid in the bacterium.

57. The recombinant bacterium of any one of claims 1-56, wherein the bacterium is a probiotic bacterium.

58. The recombinant bacterium of any one of claims 1-57, wherein the bacterium is a tumor targeting bacterium.

59. The recombinant bacterium of claim 58, wherein the bacterium is selected from the group consisting of Bacteroides, Bifidobacterium, Clostridium, Escherichia, Lactobacillus, and Lactococcus.

60. The recombinant bacterium of claim 59, wherein the bacterium is selected from Clostridium novyi NT, and Clostridium butyricum, and Bifidobacterium longum.

61. The recombinant bacterium of claim any of claims 1-60, wherein the bacterium is Escherichia coli strain Nissle.

62. The recombinant bacterium of any one of claims 1-61, wherein the bacterium is an auxotroph in a gene that is complemented when the bacterium is present in a mammalian gut.

63. The recombinant bacterium of claim 62, wherein the bacterium is an auxotroph in diaminopimelic acid or an enzyme in the thymine biosynthetic pathway.

64. The recombinant bacterium of any one of claims 1-63, wherein the recombinant bacterium is capable of producing about 25 pg/1E9 cells/hr to about 4500 pg/1E9 cells/hr of IL-2 in vitro.

65. The recombinant bacterium of any one of claims 1-64, wherein the recombinant bacterium is capable of producing about 1.5 ng/1E9 cells/hr to about 3 ng/1E9 cells/hr of IL15 in vitro.

66. A recombinant bacterium capable of secreting IL-22 comprising
1) a nucleic acid sequence encoding IL-22 and one or more secretion tags, wherein the nucleic acid sequence is operably linked to an FNR-responsive promoter;
2) one or more mutations or deletions in an outer membrane protein PAL.

67. The recombinant bacterium of claim 66, wherein the secretion tag is selected from a group consisting of PhoA, OmpF, ompA, cvaC, TorA, fdnG, dmsA, PelB, tolB, torT, dsbA, GltI, GspD, HdeB, MalE, mglB, OppA, PpiA, lamb, ECOLIN_05715, ECOLIN_16495, ECOLIN_19410, and ECOLIN_19880 secretion signals.

68. The recombinant bacterium of claim 66 or 67, wherein the bacterium is capable of producing about 40 ng/1E8 cells/hr of IL-22 in vitro.

69. A pharmaceutically acceptable composition comprising the recombinant bacterium of any one of claims 1-68; and a pharmaceutically acceptable carrier.

70. The composition of claim 69 formulated for oral or rectal administration.

71. A method of treating or preventing a disorder comprising the step of administering to a patient in need thereof, the composition of any one of claims 1-70.

72. The method of claim 71, wherein the disorder is selected from a group consisting of autoimmune disorders, cancer, metabolic diseases, diseases relating to inborn errors of metabolism, and neurological or neurodegenerative diseases.

73. The method of claim 72, wherein the autoimmune disorder is selected from the group consisting of acute disseminated encephalomyelitis (ADEM), acute necrotizing hemorrhagic leukoencephalitis, Addison's disease, agammaglobulinemia, alopecia areata, amyloidosis, ankylosing spondylitis, anti-GBM/anti-TBM nephritis, antiphospholipid syndrome (APS), autoimmune angioedema, autoimmune aplastic anemia, autoimmune dysautonomia, autoimmune hemolytic anemia, autoimmune hepatitis, autoimmune hyperlipidemia, autoimmune immunodeficiency, autoimmune inner ear disease (AIED), autoimmune myocarditis, autoimmune oophoritis, autoimmune pancreatitis, autoimmune retinopathy, autoimmune thrombocytopenic purpura (ATP), autoimmune thyroid disease, autoimmune urticarial, Axonal & neuronal neuropathies, Balo disease, Behcet's disease, Bullous pemphigoid, Cardiomyopathy, Castleman disease, Celiac disease, Chagas disease, Chronic inflammatory demyelinating polyneuropathy (CIDP), Chronic recurrent multifocal ostomyelitis (CRMO), Churg-Strauss syndrome, Cicatricial pemphigoid/benign mucosal pemphigoid, Crohn's disease, Cogan syndrome, Cold agglutinin disease, Congenital heart block, Coxsackie myocarditis, CREST disease, Essential mixed cryoglobulinemia, Demyelinating neuropathies, Dermatitis herpetiformis, Dermatomyositis, Devic's disease (neuromyelitis optica), Discoid lupus, Dressler's syndrome, Endometriosis, Eosinophilic esophagitis, Eosinophilic fasciitis, Erythema nodosum, Experimental allergic encephalomyelitis, Evans syndrome, Fibrosing alveolitis, Giant cell arteritis (temporal arteritis), Giant cell myocarditis, Glomerulonephritis, Goodpasture's syndrome, Granulomatosis with Polyangiitis (GPA), Graves' disease, Guillain-Barre syndrome, Hashimoto's encephalitis, Hashimoto's thyroiditis, Hemolytic anemia, Henoch-Schonlein purpura, Herpes gestationis, Hypogammaglobulinemia, Idiopathic thrombocytopenic purpura (ITP), IgA nephropathy, IgG4-related sclerosing disease, Immunoregulatory lipoproteins, Inclusion body myositis, Interstitial cystitis, Juvenile arthritis, Juvenile idiopathic arthritis, Juvenile myositis, Kawasaki syndrome, Lambert-Eaton syndrome, Leukocytoclastic vasculitis, Lichen planus, Lichen sclerosus, Ligneous conjunctivitis, Linear IgA disease (LAD), Lupus (Systemic Lupus Erythematosus), chronic Lyme disease, Meniere's disease, Microscopic polyangiitis, Mixed connective tissue disease (MCTD), Mooren's ulcer, Mucha-Habermann disease, Multiple sclerosis, Myasthenia gravis, Myositis, Narcolepsy, Neuromyelitis optica (Devic's), Neutropenia, Ocular cicatricial pemphigoid, Optic neuritis, Palindromic rheumatism, PANDAS (Pediatric autoimmune Neuropsychiatric Disorders Associated with Streptococcus), Paraneoplastic cerebellar degeneration, Paroxysmal nocturnal hemoglobinuria (PNH), Parry Romberg syndrome, Parsonnage-Turner syndrome, Pars planitis (peripheral uveitis), Pemphigus, Peripheral neuropathy, Perivenous encephalomyelitis, Pernicious anemia, POEMS syndrome, Polyarteritis nodosa, Type I, II, & III autoimmune polyglandular syndromes, Polymyalgia rheumatic, Polymyositis, Postmyocardial infarction syndrome, Postpericardiotomy syndrome, Progesterone dermatitis, Primary biliary cirrhosis, Primary sclerosing cholangitis, Psoriasis, Psoriatic arthritis, Idiopathic pulmonary fibrosis, Pyoderma gangrenosum, Pure red cell aplasia, Raynauds phenomenon, reactive arthritis, reflex sympathetic dystrophy, Reiter's syndrome, relapsing polychondritis, restless legs syndrome, retroperitoneal fibrosis, rheumatic fever, rheumatoid arthritis, sarcoidosis, Schmidt syndrome, scleritis, scleroderma, Sjogren's syndrome, sperm & testicular autoimmunity, stiff person syndrome, subacute bacterial endocarditis (SBE), Susac's syndrome, sympathetic ophthalmia, Takayasu's arteritis, temporal arteritis/giant cell arteritis, thrombocytopenic purpura (TTP), Tolosa-Hunt syndrome, transverse myelitis, type 1 diabetes, asthma, ulcerative colitis, undifferentiated connective tissue disease (UCTD), uveitis, vasculitis, vesiculobullous dermatosis, vitiligo, and Wegener's granulomatosis.

74. The method of claim 72, wherein the cancer is selected from adrenal cancer, adrenocortical carcinoma, anal cancer, appendix cancer, bile duct cancer, bladder cancer, bone cancer (e.g., Ewing sarcoma tumors, osteosarcoma, malignant fibrous histiocytoma), brain cancer (e.g., astrocytomas, brain stem glioma, craniopharyngioma, ependymoma), bronchial tumors, central nervous system tumors, breast cancer, Castleman disease, cervical cancer, colon cancer, rectal cancer, colorectal cancer, endometrial cancer, esophageal cancer, eye cancer, gallbladder cancer, gastrointestinal cancer, gastrointestinal carcinoid tumors, gastrointestinal stromal tumors, gestational trophoblastic disease, heart cancer, Kaposi sarcoma, kidney cancer, largyngeal cancer, hypopharyngeal cancer, leukemia (e.g., acute lymphoblastic leukemia, acute myeloid leukemia, chronic lymphocytic leukemia, chronic myelogenous leukemia), liver cancer, lung cancer, lymphoma (e.g., AIDS-related lymphoma, Burkitt lymphoma, cutaneous T cell lymphoma, Hodgkin lymphoma, Non-Hodgkin lymphoma, primary central nervous system lymphoma), malignant mesothelioma, multiple myeloma, myelodysplastic syndrome, nasal cavity cancer, paranasal sinus cancer, nasopharyngeal cancer, neuroblastoma, oral cavity cancer, oropharyngeal cancer, osteosarcoma, ovarian cancer, pancreatic cancer, penile cancer, pituitary tumors, prostate cancer, retinoblastoma, rhabdomyosarcoma, rhabdoid tumor, salivary gland cancer, sarcoma, skin cancer (e.g., basal cell carcinoma, melanoma), small intestine cancer, stomach cancer, teratoid tumor, testicular cancer, throat cancer, thymus cancer, thyroid cancer, unusual childhood cancers, urethral cancer, uterine cancer, uterine sarcoma, vaginal cancer, vulvar cancer, Waldenström macrogloblulinemia, and Wilms tumor.

75. The method of claim 72, wherein the metabolic disorder or condition is selected from the group consisting of: type 1 diabetes; type 2 diabetes; metabolic syndrome; Bardet-Biedel syndrome; Prader-Willi syndrome; non-alcoholic fatty liver disease; tuberous sclerosis; Albright hereditary osteodystrophy; brain-derived neurotrophic factor (BDNF) deficiency; Single-minded 1 (SIM1) deficiency; leptin deficiency; leptin receptor deficiency; pro-opiomelanocortin (POMC) defects; proprotein convertase subtilisin/kexin type 1 (PCSK1) deficiency; Src homology 2B1 (SH2B1) deficiency; pro-hormone convertase 1/3 deficiency; melanocortin-4-receptor (MC4R) deficiency; Wilms tumor, aniridia, genitourinary anomalies, and mental retardation (WAGR) syndrome; pseudohypoparathyroidism type 1A; Fragile X syndrome; Borjeson-Forsmann-Lehmann syndrome; Alstrom syndrome; Cohen syndrome; and ulnar-mammary syndrome.

The application's sequence listing, which the Patent Office published only in electronic form, follows.

SEQUENCE LISTING (1293 sequences)

SEQ ID NO: 1-140 - skipped (140 entries)

SEQ ID NO: 141 - DNA, 483 bp, Homo sapiens
atgagccccggacagggaactcaaagcgagaacagctgcacacattttccaggtaatcttccaaatatgcttcgtgacttgcgtgacgctttctctcgcgtgaaaaccttttttcagatgaaggatcagttagataatctgctgctgaaagaatcgcttcttgaggacttcaagggatatctgggatgtcaggcgttatctgagatgattcagttttatttggaagaagttatgccccaggctgagaatcaagaccctgacatcaaagcgcatgtgaatagcctgggcgagaatctgaagacactgcgcctgcgtcttcgccgctgtcaccgttttctgccttgcgaaaataagagtaaggccgttgagcaagtgaaaaatgctttcaacaagttacaagaaaaagggatttacaaagctatgtctgagtttgacattttcattaattacattgaggcctacatgactatgaagattcgcaat

SEQ ID NO: 142 - protein, 8 aa, Artificial Sequence
  Description of Artificial Sequence: Synthetic peptide
GGGSGGGS

SEQ ID NO: 143 - protein, 327 aa, Artificial Sequence
  Description of Artificial Sequence: Synthetic polypeptide
SPGQGTQSENSCTHFPGNLPNMLRDLRDAFSRVKTFFQMKDQLDNLLLKESLLEDFKGYLGCQALSEMIQFYLEEVMPQAENQDPDIKAHVNSLGENLKTLRLRLRRCHRFLPCENKSKAVEQVKNAFNKLQEKGIYKAMSEFDIFINYIEAYMTMKIRNGGGSGGGSPGQGTQSENSCTHFPGNLPNMLRDLRDAFSRVKTFFQMKDQLDNLLLKESLLEDFKGYLGCQALSEMIQFYLEEVMPQAENQDPDIKAHVNSLGENLKTLRLRLRRCHRFLPCENKSKAVEQVKNAFNKLQEKGIYKAMSEFDIFINYIEAYMTMKIRN

SEQ ID NO: 144 - protein, 134 aa, Homo sapiens
MAPTSSSTKKTQLQLEHLLLDLQMILNGINNYKNPKLTRMLTFKFYMPKKATELKHLQCLEEELKPLEEVLNLAQSKNFHLRPRDLISNINVIVLELKGSETTFMCEYADETATIVEFLNRWITFCQSIISTLT

SEQ ID NO: 145 - protein, 179 aa, Homo sapiens
MAALQKSVSSFLMGTLATSCLLLLALLVQGGAAAPISSHCRLDKSNFQQPYITNRTFMLAKEASLADNNTDVRLIGEKLFHGVSMSERCYLMKQVLNFTLEEVLFPQSDRFQPYMQEVVPFLARLSNRLSTCHIEGDDLHIQRNVQKLKDTVKKLGESGEIKAIGELDLLFMSLRNACI

SEQ ID NO: 146 - protein, 243 aa, Homo sapiens
MGQTAGDLGWRLSLLLLPLLLVQAGVWGFPRPPGRPQLSLQELRREFTVSLHLARKLLSEVRGQAHRFAESHLPGVNLYLLPLGEQLPDVSLTFQAWRRLSDPERLCFISTTLQPFHALLGGLGTQGRWTNMERMQLWAMRLDLRDLQRHLRFQVLAAGFNLPEEEEEEEEEEEEERKGLLPGALGSALQGPAQVSWPQLLSTYRLLHSLELVLSRAVRELLLLSKAGHSVWPLGFPTLSPQP

SEQ ID NO: 147 - protein, 154 aa, Artificial Sequence [sequence omitted]

SEQ ID NO: 148 - protein, 33 aa, Homo sapiens
HADGSFSDEMNTILDNLAARDFINWLIQTKITD

SEQ ID NO: 149 - protein, 33 aa, Artificial Sequence
  Description of Artificial Sequence: Synthetic polypeptide
HGDGSFSDEMNTILDNLAARDFINWLIQTKITD

SEQ ID NO: 150 - skipped

SEQ ID NO: 151 - DNA, 290 bp, Artificial Sequence
  Description of Artificial Sequence: Synthetic polynucleotide
gtcagcataacaccctgacctctcattaattgttcatgccgggcggcactatcgtcgtccggccttttcctctcttactctgctacgtacatctatttctataaatccgttcaatttgtctgttttttgcacaaacatgaaatatcagacaattccgtgacttaagaaaatttatacaaatcagcaatataccccttaaggagtatataaaggtgaatttgatttacatcaataagcggggttgctgaatcgttaaggtaggcggtaatagaaaagaaatcgaggcaaaa

SEQ ID NO: 152 - DNA, 173 bp, Artificial Sequence
  Description of Artificial Sequence: Synthetic polynucleotide
atttcctctcatcccatccggggtgagagtcttttcccccgacttatggctcatgcatgcatcaaaaaagatgtgagcttgatcaaaaacaaaaaatatttcactcgacaggagtatttatattgcgcccgttacgtgggcttcgactgtaaatcagaaaggagaaaacacct

SEQ ID NO: 153 - DNA, 305 bp, Artificial Sequence
  Description of Artificial Sequence: Synthetic polynucleotide
gtcagcataacaccctgacctctcattaattgttcatgccgggcggcactatcgtcgtccggccttttcctctcttactctgctacgtacatctatttctataaatccgttcaatttgtctgttttttgcacaaacatgaaatatcagacaattccgtgacttaagaaaatttatacaaatcagcaatataccccttaaggagtatataaaggtgaatttgatttacatcaataagcggggttgctgaatcgttaaggatccctctagaaataattttgtttaactttaagaaggagatatacat

SEQ ID NO: 154 - DNA, 180 bp, Artificial Sequence
  Description of Artificial Sequence: Synthetic polynucleotide
catttcctctcatcccatccggggtgagagtcttttcccccgacttatggctcatgcatgcatcaaaaaagatgtgagcttgatcaaaaacaaaaaatatttcactcgacaggagtatttatattgcgcccggatccctctagaaataattttgtttaactttaagaaggagatatacat

SEQ ID NO: 155 - DNA, 199 bp, Artificial Sequence
  Description of Artificial Sequence: Synthetic polynucleotide
agttgttcttattggtggtgttgctttatggttgcatcgtagtaaatggttgtaacaaaagcaatttttccggctgtctgtatacaaaaacgccgtaaagtttgagcgaagtcaataaactctctacccattcagggcaatatctctcttggatccctctagaaataattttgtttaactttaagaaggagatatacat

SEQ ID NO: 156 - DNA, 117 bp, Artificial Sequence
  Description of Artificial Sequence: Synthetic polynucleotide
atccccatcactcttgatggagatcaattccccaagctgctagagcgttaccttgcccttaaacattagcaatgtcgatttatcagagggccgacaggctcccacaggagaaaaccg

SEQ ID NO: 157 - DNA, 108 bp, Artificial Sequence
  Description of Artificial Sequence: Synthetic polynucleotide
ctcttgatcgttatcaattcccacgctgtttcagagcgttaccttgcccttaaacattagcaatgtcgatttatcagagggccgacaggctcccacaggagaaaaccg

SEQ ID NO: 158 - DNA, 290 bp, Artificial Sequence; identical to SEQ ID NO: 151
  Description of Artificial Sequence: Synthetic polynucleotide

SEQ ID NO: 159 - DNA, 433 bp, Artificial Sequence
  Description of Artificial Sequence: Synthetic polynucleotide
cggcccgatcgttgaacatagcggtccgcaggcggcactgcttacagcaaacggtctgtacgctgtcgtctttgtgatgtgcttcctgttaggtttcgtcagccgtcaccgtcagcataacaccctgacctctcattaattgctcatgccggacggcactatcgtcgtccggccttttcctctcttcccccgctacgtgcatctatttctataaacccgctcattttgtctattttttgcacaaacatgaaatatcagacaattccgtgacttaagaaaatttatacaaatcagcaatatacccattaaggagtatataaaggtgaatttgatttacatcaataagcggggttgctgaatcgttaaggtaggcggtaatagaaaagaaatcgaggcaaaaatgtttgtttaactttaagaaggagatatacat

SEQ ID NO: 160 - DNA, 290 bp, Artificial Sequence
  Description of Artificial Sequence: Synthetic polynucleotide
gtcagcataacaccctgacctctcattaattgctcatgccggacggcactatcgtcgtccggccttttcctctcttcccccgctacgtgcatctatttctataaacccgctcattttgtctattttttgcacaaacatgaaatatcagacaattccgtgacttaagaaaatttatacaaatcagcaatatacccattaaggagtatataaaggtgaatttgatttacatcaataagcggggttgctgaatcgttaaggtaggcggtaatagaaaagaaatcgaggcaaaa

SEQ ID NO: 161 - DNA, 173 bp, Artificial Sequence; identical to SEQ ID NO: 152
  Description of Artificial Sequence: Synthetic polynucleotide

SEQ ID NO: 162 - DNA, 305 bp, Artificial Sequence; identical to SEQ ID NO: 153
  Description of Artificial Sequence: Synthetic polynucleotide

SEQ ID NO: 163 - DNA, 180 bp, Artificial Sequence; identical to SEQ ID NO: 154
  Description of Artificial Sequence: Synthetic polynucleotide

SEQ ID NO: 164 - DNA, 199 bp, Artificial Sequence; identical to SEQ ID NO: 155
  Description of Artificial Sequence: Synthetic polynucleotide

SEQ ID NO: 165 - DNA, 207 bp, Artificial Sequence
  Description of Artificial Sequence: Synthetic polynucleotide
agttgttcttattggtggtgttgctttatggttgcatcgtagtaaatggttgtaacaaaagcaatttttccggctgtctgtatacaaaaacgccgcaaagtttgagcgaagtcaataaactctctacccattcagggcaatatctctcttggatccaaagtgaactctagaaataattttgtttaactttaagaaggagatatacat

SEQ ID NO: 166 - DNA, 390 bp, Artificial Sequence
  Description of Artificial Sequence: Synthetic polynucleotide
tcgtctttgtgatgtgcttcctgttaggtttcgtcagccgtcaccgtcagcataacaccctgacctctcattaattgctcatgccggacggcactatcgtcgtccggccttttcctctcttcccccgctacgtgcatctatttctataaacccgctcattttgtctattttttgcacaaacatgaaatatcagacaattccgtgacttaagaaaatttatacaaatcagcaatatacccattaaggagtatataaaggtgaatttgatttacatcaataagcggggttgctgaatcgttaaggtagaaatgtgatctagttcacatttgcggtaatagaaaagaaatcgaggcaaaaatgtttgtttaactttaagaaggagatatacat

SEQ ID NO: 167 - DNA, 200 bp, Artificial Sequence
  Description of Artificial Sequence: Synthetic polynucleotide
agttgttcttattggtggtgttgctttatggttgcatcgtagtaaatggttgtaacaaaagcaatttttccggctgtctgtatacaaaaacgccgcaaagtttgagcgaagtcaataaactctctacccattcagggcaatatctctcaaatgtgatctagttcacattttttgtttaactttaagaaggagatatacat

SEQ ID NO: 168 - DNA, 355 bp, Artificial Sequence
  Description of Artificial Sequence: Synthetic polynucleotide
tgtggcttttatgaaaatcacacagtgatcacaaattttaaacagagcacaaaatgctgcctcgaaatgagggcgggaaaataaggttatcagccttgttttctccctcattacttgaaggatatgaagctaaaacccttttttataaagcatttgtccgaattcggacataatcaaaaaagcttaattaagatcaatttgatctacatctctttaaccaacaatatgtaagatctcaactatcgcatccgtggattaattcaattataacttctctctaacgctgtgtatcgtaacggtaacactgtagaggggagcacattgatgcgaattcattaaagaggagaaaggtacc

SEQ ID NO: 169 - DNA, 228 bp, Artificial Sequence
  Description of Artificial Sequence: Synthetic polynucleotide
ttccgaaaattcctggcgagcagataaataagaattgttcttatcaatatatctaactcattgaatctttattagttttgtttttcacgcttgttaccactattagtgtgataggaacagccagaatagcggaacacatagccggtgctatacttaatctcgttaattactgggacataacatcaagaggatatgaaattcgaattcattaaagaggagaaaggtacc

SEQ ID NO: 170 - DNA, 334 bp, Artificial Sequence
  Description of Artificial Sequence: Synthetic polynucleotide
gcttagatcaggtgattgccctttgtttatgagggtgttgtaatccatgtcgttgttgcatttgtaagggcaacacctcagcctgcaggcaggcactgaagataccaaagggtagttcagattacacggtcacctggaaagggggccattttactttttatcgccgctggcggtgcaaagttcacaaagttgtcttacgaaggttgtaaggtaaaacttatcgatttgataatggaaacgcattagccgaatcggcaaaaattggttaccttacatctcatcgaaaacacggaggaagtatagatgcgaattcattaaagaggagaaaggtacc

SEQ ID NO: 171 - DNA, 134 bp, Artificial Sequence
  Description of Artificial Sequence: Synthetic polynucleotide
ctcgagttcattatccatcctccatcgccacgatagttcatggcgataggtagaatagcaatgaacgattatccctatcaagcattctgactgataattgctcacacgaattcattaaagaggagaaaggtacc

SEQ ID NO: 172 - DNA, 1921 bp, Artificial Sequence
  Description of Artificial Sequence: Synthetic polynucleotide
ttacccgtctggattttcagtacgcgcttttaaacgacgccacagcgtggtacggctgatccccaaataacgtgcggcggcgcgcttatcgccattaaagcgtgcgagcacctcctgcaatggaagcgcttctgctgacgagggcgtgatttctgctgtggtccccaccagttcaggtaataattgccgcataaattgtctgtccagtgttggtgcgggatcgacgcttaaaaaaagcgccaggcgttccatcatattccgcagttcgcgaatattaccgggccaatgatagttcagtagaagcggctgacactgcgtcagcccatgacgcaccgattcggtaaaagggatctccatcgcggccagcgattgttttaaaaagttttccgccagaggcagaatatcaggctgtcgctcgcgcaaggggggaagcggcagacgcagaatgctcaaacggtaaaacagatcggtacgaaaacgtccttgcgttatctcccgatccagatcgcaatgcgtggcgctgatcacccggacatctaccgggatcggctgatgcccgccaacgcgggtgacggctttttcctccagtacgcgtagaaggcgggtttgtaacggcagcggcatttcgccaatttcgtcaagaaacagcgtgccgccgtgggcgacctcaaacagccccgcacgtccacctcgtcttgagccggtaaacgctccctcctcatagccaaacagttcagcctccagcaacgactcggtaatcgcgccgcaattaacggcgacaaagggcggagaaggcttgttctgacggtggggctgacggttaaacaacgcctgatgaatcgcttgcgccgccagctctttcccggtccctgtttccccctgaatcagcactgccgcgcgggaacgggcatagagtgtaatcgtatggcgaacctgctccatttgtggtgaatcgccgaggatatcgctcagcgcataacgggtctgtaatcccttgctggaggtatgctggctatactgacgccgtgtcaggcgggtcatatccagcgcatcatggaaagcctgacgtacggtggccgctgaataaataaagatggcggtcattcctgcctcttccgccaggtcggtaattagtcctgccccaattacagcctcaatgccgttagctttgagctcgttaatttgcccgcgagcatcctcttcagtgatatagcttcgctgttcaagacggaggtgaaacgttttctgaaaggcgaccagagccggaatggtctcctgataggtcacgattcccattgaggaagtcagctttcccgcttttgccagagcctgtaatacatcgaatccgctgggtttgatgaggatgacaggtaccgacagtcggctttttaaataagcgccgttggaacctgccgcgataatcgcgtcgcagcgttcggttgccagttttttgcgaatgtaggctactgccttttcaaaaccgagctgaataggcgtgatcgtcgccagatgatcaaactccaggctgatatcccgaaatagttcgaacaggcgcgttaccgagaccgtccagatcaccggtttatcgctattatcgcgcgaagcgctatgcacagtaaccatcgtcgtagattcatgtttaaggaacgaattcttgttttatagatgtttcgttaatgttgcaatgaaacacaggcctccgtttcatgaaacgttagctgactcgtttttcttgtgactcgtctgtcagtattaaaaaagatttttcatttaactgattgtttttaaattgaattttatttaatggtttctcggtttttgggtctggcatatcccttgctttaatgagtgcatcttaattaacaattcaataacaagagggctgaatagtaatttcaacaaaataacgagcattcgaatg

SEQ ID NO: 173 - DNA, 305 bp, Artificial Sequence
  Description of Artificial Sequence: Synthetic polynucleotide
cagacattgccgtcactgcgtcttttactggctcttctcgctaacccaaccggtaaccccgcttattaaaagcattctgtaacaaagcgggaccaaagccatgacaaaaacgcgtaacaaaagtgtctataatcacggcagaaaagtccacattgattatttgcacggcgtcacactttgctatgccatagcatttttatccataagattagcggatccagcctgacgctttttttcgcaactctctactgtttctccatacctctagaaataattttgtttaactttaagaaggagatatacat

SEQ ID NO: 174 - DNA, 897 bp, Artificial Sequence
  Description of Artificial Sequence: Synthetic polynucleotide
ttattcacaacctgccctaaactcgctcggactcgccccggtgcattttttaaatactcgcgagaaatagagttgatcgtcaaaaccgacattgcgaccgacggtggcgataggcatccgggtggtgctcaaaagcagcttcgcctgactgatgcgctggtcctcgcgccagcttaatacgctaatccctaactgctggcggaacaaatgcgacagacgcgacggcgacaggcagacatgctgtgcgacgctggcgatatcaaaattactgtctgccaggtgatcgctgatgtactgacaagcctcgcgtacccgattatccatcggtggatggagcgactcgttaatcgcttccatgcgccgcagtaacaattgctcaagcagatttatcgccagcaattccgaatagcgcccttccccttgtccggcattaatgatttgcccaaacaggtcgctgaaatgcggctggtgcgcttcatccgggcgaaagaaaccggtattggcaaatatcgacggccagttaagccattcatgccagtaggcgcgcggacgaaagtaaacccactggtgataccattcgtgagcctccggatgacgaccgtagtgatgaatctctccaggcgggaacagcaaaatatcacccggtcggcagacaaattctcgtccctgatttttcaccaccccctgaccgcgaatggtgagattgagaatataacctttcattcccagcggtcggtcgataaaaaaatcgagataaccgttggcctcaatcggcgttaaacccgccaccagatgggcgttaaacgagtatcccggcagcaggggatcattttgcgcttcagccatacttttcatactcccgccattcagagaagaaaccaattgtccatattgcat

SEQ ID NO: 175 - protein, 298 aa, Artificial Sequence
  Description of Artificial Sequence: Synthetic polypeptide
MQYGQLVSSLNGGSMKSMAEAQNDPLLPGYSFNAHLVAGLTPIEANGYLDFFIDRPLGMKGYILNLTIRGQGVVKNQGREFVCRPGDILLFPPGEIHHYGRHPEAHEWYHQWVYFRPRAYWHEWLNWPSIFANTGFFRPDEAHQPHFSDLFGQIINAGQGEGRYSELLAINLLEQLLLRRMEAINESLHPPMDNRVREACQYISDHLADSNFDIASVAQHVCLSPSRLSHLFRQQLGISVLSWREDQRISQAKLLLSTTRMPIATVGRNVGFDDQLYFSRVFKKCTGASPSEFRAGCE

SEQ ID NO: 176 - DNA, 280 bp, Artificial Sequence
  Description of Artificial Sequence: Synthetic polynucleotide
cggtgagcatcacatcaccacaattcagcaaattgtgaacatcatcacgttcatctttccctggttgccaatggcccattttcctgtcagtaacgagaaggtcgcgaatcaggcgctttttagactggtcgtaatgaaattcagctgtcaccggatgtgctttccggtctgatgagtccgtgaggacgaaacagcctctacaaataattttgtttaaaacaacacccactaagataactctagaaataattttgtttaactttaagaaggagatatacat

SEQ ID NO: 177 - DNA, 326 bp, Artificial Sequence
  Description of Artificial Sequence: Synthetic polynucleotide
attcaccaccctgaattgactctcttccgggcgctatcatgccataccgcgaaaggttttgcgccattcgatggcgcgccgcttcgtcaggccacatagctttcttgttctgatcggaacgatcgttggctgtgttgacaattaatcatcggctcgtataatgtgtggaattgtgagcgctcacaattagctgtcaccggatgtgctttccggtctgatgagtccgtgaggacgaaacagcctctacaaataattttgtttaaaacaacacccactaagataactctagaaataattttgtttaactttaagaaggagatatacat

SEQ ID NO: 178 - DNA, 22 bp, Artificial Sequence
  Description of Artificial Sequence: Synthetic oligonucleotide
ggaattgtgagcgctcacaatt

SEQ ID NO: 179 - DNA, 1083 bp, Artificial Sequence
  Description of Artificial Sequence: Synthetic polynucleotide
tcactgcccgctttccagtcgggaaacctgtcgtgccagctgcattaatgaatcggccaacgcgcggggagaggcggtttgcgtattgggcgccagggtggtttttcttttcaccagtgagactggcaacagctgattgcccttcaccgcctggccctgagagagttgcagcaagcggtccacgctggtttgccccagcaggcgaaaatcctgtttgatggtggttaacggcgggatataacatgagctatcttcggtatcgtcgtatcccactaccgagatatccgcaccaacgcgcagcccggactcggtaatggcgcgcattgcgcccagcgccatctgatcgttggcaaccagcatcgcagtgggaacgatgccctcattcagcatttgcatggtttgttgaaaaccggacatggcactccagtcgccttcccgttccgctatcggctgaatttgattgcgagtgagatatttatgccagccagccagacgcagacgcgccgagacagaacttaatgggcccgctaacagcgcgatttgctggtgacccaatgcgaccagatgctccacgcccagtcgcgtaccgtcctcatgggagaaaataatactgttgatgggtgtctggtcagagacatcaagaaataacgccggaacattagtgcaggcagcttccacagcaatggcatcctggtcatccagcggatagttaatgatcagcccactgacgcgttgcgcgagaagattgtgcaccgccgctttacaggcttcgacgccgcttcgttctaccatcgacaccaccacgctggcacccagttgatcggcgcgagatttaatcgccgcgacaatttgcgacggcgcgtgcagggccagactggaggtggcaacgccaatcagcaacgactgtttgcccgccagttgttgtgccacgcggttgggaatgtaattcagctccgccatcgccgcttccactttttcccgcgttttcgcagaaacgtggctggcctggttcaccacgcgggaaacggtctgataagagacaccggcatactctgcgacatcgtataacgttactggtttcat

SEQ ID NO: 180 - protein, 360 aa, Artificial Sequence
  Description of Artificial Sequence: Synthetic polypeptide
MKPVTLYDVAEYAGVSYQTVSRVVNQASHVSAKTREKVEAAMAELNYIPNRVAQQLAGKQSLLIGVATSSLALHAPSQIVAAIKSRADQLGASVVVSMVERSGVEACKAAVHNLLAQRVSGLIINYPLDDQDAIAVEAACTNVPALFLDVSDQTPINSIIFSHEDGTRLGVEHLVALGHQQIALLAGPLSSVSARLRLAGWHKYLTRNQIQPIAEREGDWSAMSGFQQTMQMLNEGIVPTAMLVANDQMALGAMRAITESGLRVGADISVVGYDDTEDSSCYIPPLTTIKQDFRLLGQTSVDRLLQLSQGQAVKGNQLLPVSLVKRKTTLAPNTQTASPRALADSLMQLARQVSRLESGQ

SEQ ID NO: 181-182 - skipped (2 entries)

SEQ ID NO: 183 - DNA, 222 bp, Artificial Sequence
  Description of Artificial Sequence: Synthetic polynucleotide
acgttaaatctatcaccgcaagggataaatatctaacaccgtgcgtgttgactattttacctctggcggtgataatggttgcatagctgtcaccggatgtgctttccggtctgatgagtccgtgaggacgaaacagcctctacaaataattttgtttaaaacaacacccactaagataactctagaaataattttgtttaactttaagaaggagatatacat

SEQ ID NO: 184 - DNA, 714 bp, Artificial Sequence
  Description of Artificial Sequence: Synthetic polynucleotide
tcagccaaacgtctcttcaggccactgactagcgataactttccccacaacggaacaactctcattgcatgggatcattgggtactgtgggtttagtggttgtaaaaacacctgaccgctatccctgatcagtttcttgaaggtaaactcatcacccccaagtctggctatgcagaaatcacctggctcaacagcctgctcagggtcaacgagaattaacattccgtcaggaaagcttggcttggagcctgttggtgcggtcatggaattaccttcaacctcaagccagaatgcagaatcactggcttttttggttgtgcttacccatctctccgcatcacctttggtaaaggttctaagcttaggtgagaacatccctgcctgaacatgagaaaaaacagggtactcatactcacttctaagtgacggctgcatactaaccgcttcatacatctcgtagatttctctggcgattgaagggctaaattcttcaacgctaactttgagaatttttgtaagcaatgcggcgttataagcatttaatgcattgatgccattaaataaagcaccaacgcctgactgccccatccccatcttgtctgcgacagattcctgggataagccaagttcatttttctttttttcataaattgctttaaggcgacgtgcgtcctcaagctgctcttgtgttaatggtttcttttttgtgctcat

SEQ ID NO: 185 - protein, 237 aa, Artificial Sequence
  Description of Artificial Sequence: Synthetic polypeptide
MSTKKKPLTQEQLEDARRLKAIYEKKKNELGLSQESVADKMGMGQSGVGALFNGINALNAYNAALLTKILKVSVEEFSPSIAREIYEMYEAVSMQPSLRSEYEYPVFSHVQAGMFSPKLRTFTKGDAERWVSTTKKASDSAFWLEVEGNSMTAPTGSKPSFPDGMLILVDPEQAVEPGDFCIARLGGDEFTFKKLIRDSGQVFLQPLNPQYPMIPCNESCSVVGKVIASQWPEETFG

SEQ ID NO: 186 - DNA, 56 bp, Artificial Sequence
  Description of Artificial Sequence: Synthetic oligonucleotide
gttgacactctatcattgatagagttattttaccactccctatcagtgatagagaa

SEQ ID NO: 187 - DNA, 642 bp, Artificial Sequence
  Description of Artificial Sequence: Synthetic polynucleotide
ttaagacccactttcacatttaagttgtttttctaatccgcatatgatcaattcaaggccgaataagaaggctggctctgcaccttggtgatcaaataattcgatagcttgtcgtaataatggcggcatactatcagtagtaggtgtttccctttcttctttagcgacttgatgctcttgatcttccaatacgcaacctaaagtaaaatgccccacagcgctgagtgcatataatgcattctctagtgaaaaaccttgttggcataaaaaggctaattgattttcgagagtttcatactgtttttctgtaggccgtgtacctaaatgtacttttgctccatcgcgatgacttagtaaagcacatctaaaacttttagcgttattacgtaaaaaatcttgccagctttccccttctaaagggcaaaagtgagtatggtgcctatctaacatctcaatggctaaggcgtcgagcaaagcccgcttattttttacatgccaatacaatgtaggctgctctacacctagcttctgggcgagtttacgggttgttaaaccttcgattccgacctcattaagcagctctaatgcgctgttaatcactttacttttatctaatctagacatcattaattcctaattttt

SEQ ID NO: 188 - DNA, 225 bp, Artificial Sequence
  Description of Artificial Sequence: Synthetic polynucleotide
tcacctttcccggattaaacgcttttttgcccggtggcatggtgctaccggcgatcacaaacggttaattatgacacaaattgacctgaatgaatatacagtattggaatgcattacccggagtgttgtgtaacaatgtctggccaggtttgtttcccggaaccgaggtcacaacatagtaaaagcgctattggtaatggtacaatcgcgcgtttacacttattc

SEQ ID NO: 189 - DNA, 30 bp, Artificial Sequence
  Description of Artificial Sequence: Synthetic oligonucleotide
taaacaactaacggacaattctacctaaca

SEQ ID NO: 190 - DNA, 30 bp, Artificial Sequence
  Description of Artificial Sequence: Synthetic oligonucleotide
acatcaagccaaattaaacaggattaacac

SEQ ID NO: 191 - DNA, 30 bp, Artificial Sequence
  Description of Artificial Sequence: Synthetic oligonucleotide
gaggtaaaatagtcaacacgcacggtgtta

SEQ ID NO: 192 - DNA, 30 bp, Artificial Sequence
  Description of Artificial Sequence: Synthetic oligonucleotide
caggccggaataactccctataatgcgcca

SEQ ID NO: 193 - DNA, 30 bp, Artificial Sequence
  Description of Artificial Sequence: Synthetic oligonucleotide
ggctagctcagtcctaggtacagtgctagc

SEQ ID NO: 194 - DNA, 30 bp, Artificial Sequence
  Description of Artificial Sequence: Synthetic oligonucleotide
agctagctcagtcctaggtattatgctagc

SEQ ID NO: 195 - DNA, 30 bp, Artificial Sequence
  Description of Artificial Sequence: Synthetic oligonucleotide
agctagctcagtcctaggtactgtgctagc

SEQ ID NO: 196 - DNA, 30 bp, Artificial Sequence
  Description of Artificial Sequence: Synthetic oligonucleotide
agctagctcagtcctagggattatgctagc

SEQ ID NO: 197 - DNA, 30 bp, Artificial Sequence
  Description of Artificial Sequence: Synthetic oligonucleotide
agctagctcagtcctaggtattgtgctagc

SEQ ID NO: 198 - DNA, 30 bp, Artificial Sequence
  Description of Artificial Sequence: Synthetic oligonucleotide
ggctagctcagtcctaggtactatgctagc

SEQ ID NO: 199 - DNA, 30 bp, Artificial Sequence
  Description of Artificial Sequence: Synthetic oligonucleotide
ggctagctcagtcctaggtatagtgctagc

SEQ ID NO: 200 - DNA, 30 bp, Artificial Sequence
  Description of Artificial Sequence: Synthetic oligonucleotide
ggctagctcagccctaggtattatgctagc

SEQ ID NO: 201 - DNA, 30 bp, Artificial Sequence
  Description of Artificial Sequence: Synthetic oligonucleotide
agctagctcagtcctaggtataatgctagc

SEQ ID NO: 202 - DNA, 30 bp, Artificial Sequence
  Description of Artificial Sequence: Synthetic oligonucleotide
agctagctcagtcctagggactgtgctagc

SEQ ID NO: 203 - DNA, 30 bp, Artificial Sequence
  Description of Artificial Sequence: Synthetic oligonucleotide
ggctagctcagtcctaggtacaatgctagc

SEQ ID NO: 204 - DNA, 30 bp, Artificial Sequence; identical to SEQ ID NO: 199
  Description of Artificial Sequence: Synthetic oligonucleotide

SEQ ID NO: 205 - DNA, 30 bp, Artificial Sequence; identical to SEQ ID NO: 196
  Description of Artificial Sequence: Synthetic oligonucleotide

SEQ ID NO: 206 - DNA, 30 bp, Artificial Sequence
  Description of Artificial Sequence: Synthetic oligonucleotide
ggctagctcagtcctagggattatgctagc

SEQ ID NO: 207 - DNA, 30 bp, Artificial Sequence; identical to SEQ ID NO: 203
  Description of Artificial Sequence: Synthetic oligonucleotide

SEQ ID NO: 208 - DNA, 30 bp, Artificial Sequence
  Description of Artificial Sequence: Synthetic oligonucleotide
agctagctcagcccttggtacaatgctagc

SEQ ID NO: 209 - DNA, 30 bp, Artificial Sequence
  Description of Artificial Sequence: Synthetic oligonucleotide
agctagctcagtcctagggactatgctagc

SEQ ID NO: 210 - DNA, 30 bp, Artificial Sequence
  Description of Artificial Sequence: Synthetic oligonucleotide
agctagctcagtcctagggattgtgctagc

SEQ ID NO: 211 - DNA, 30 bp, Artificial Sequence
  Description of Artificial Sequence: Synthetic oligonucleotide
ggctagctcagtcctaggtattgtgctagc

SEQ ID NO: 212 - DNA, 30 bp, Artificial Sequence; identical to SEQ ID NO: 201
  Description of Artificial Sequence: Synthetic oligonucleotide

SEQ ID NO: 213 - DNA, 30 bp, Artificial Sequence
  Description of Artificial Sequence: Synthetic oligonucleotide
ggctagctcagtcctaggtattatgctagc

SEQ ID NO: 214 - DNA, 30 bp, Artificial Sequence; identical to SEQ ID NO: 203
  Description of Artificial Sequence: Synthetic oligonucleotide

SEQ ID NO: 215 - DNA, 30 bp, Artificial Sequence
  Description of Artificial Sequence: Synthetic oligonucleotide
aaagtgtgacgccgtgcaaataatcaatgt

SEQ ID NO: 216 - DNA, 30 bp, Artificial Sequence
  Description of Artificial Sequence: Synthetic oligonucleotide
gacgaatacttaaaatcgtcatacttattt

SEQ ID NO: 217 - DNA, 30 bp, Artificial Sequence
  Description of Artificial Sequence: Synthetic oligonucleotide
aaacctttcgcggtatggcatgatagcgcc

SEQ ID NO: 218 - DNA, 30 bp, Artificial Sequence
  Description of Artificial Sequence: Synthetic oligonucleotide
tgatagcgcccggaagagagtcaattcagg

SEQ ID NO: 219 - DNA, 30 bp, Artificial Sequence
  Description of Artificial Sequence: Synthetic oligonucleotide
ttatttaccgtgacgaactaattgctcgtg

SEQ ID NO: 220 - DNA, 30 bp, Artificial Sequence
  Description of Artificial Sequence: Synthetic oligonucleotide
catacgccgttatacgttgtttacgctttg

SEQ ID NO: 221 - DNA, 30 bp, Artificial Sequence
  Description of Artificial Sequence: Synthetic oligonucleotide
ttatgcttccggctcgtatgttgtgtggac

SEQ ID NO: 222 - DNA, 30 bp, Artificial Sequence
  Description of Artificial Sequence: Synthetic oligonucleotide
ttatgcttccggctcgtatggtgtgtggac

SEQ ID NO: 223 - DNA, 30 bp, Artificial Sequence; identical to SEQ ID NO: 198
  Description of Artificial Sequence: Synthetic oligonucleotide

SEQ ID NO: 224 - DNA, 30 bp, Artificial Sequence
  Description of Artificial Sequence: Synthetic oligonucleotide
atatatatatatatataatggaagcgtttt

SEQ ID NO: 225 - DNA, 30 bp, Artificial Sequence; identical to SEQ ID NO: 224
  Description of Artificial Sequence: Synthetic oligonucleotide

SEQ ID NO: 226 - DNA, 30 bp, Artificial Sequence
  Description of Artificial Sequence: Synthetic oligonucleotide
ccccgaaagcttaagaatataattgtaagc

SEQ ID NO: 227 - DNA, 30 bp, Artificial Sequence; identical to SEQ ID NO: 226
  Description of Artificial Sequence: Synthetic oligonucleotide

SEQ ID NO: 228 - DNA, 30 bp, Artificial Sequence
  Description of Artificial Sequence: Synthetic oligonucleotide
tgacaatatatatatatatataatgctagc

SEQ ID NO: 229 - DNA, 30 bp, Artificial Sequence
  Description of Artificial Sequence: Synthetic oligonucleotide
acaatatatatatatatatataatgctagc

SEQ ID NO: 230 - DNA, 30 bp, Artificial Sequence
  Description of Artificial Sequence: Synthetic oligonucleotide
aatatatatatatatatatataatgctagc

SEQ ID NO: 231 - DNA, 30 bp, Artificial Sequence
  Description of Artificial Sequence: Synthetic oligonucleotide
tatatatatatatatatatataatgctagc

SEQ ID NO: 232 - DNA, 30 bp, Artificial Sequence; identical to SEQ ID NO: 231
  Description of Artificial Sequence: Synthetic oligonucleotide

SEQ ID NO: 233 - DNA, 30 bp, Artificial Sequence
  Description of Artificial Sequence: Synthetic oligonucleotide
aaaaaaaaaaaaaaaaaatataatgctagc

SEQ ID NO: 234 - DNA, 30 bp, Artificial Sequence; identical to SEQ ID NO: 233
  Description of Artificial Sequence: Synthetic oligonucleotide

SEQ ID NO: 235 - DNA, 30 bp, Artificial Sequence
  Description of Artificial Sequence: Synthetic oligonucleotide
ggaattgtgagcggataacaatttcacaca

SEQ ID NO: 236 - DNA, 30 bp, Artificial Sequence; identical to SEQ ID NO: 235
  Description of Artificial Sequence: Synthetic oligonucleotide

SEQ ID NO: 237 - DNA, 30 bp, Artificial Sequence; identical to SEQ ID NO: 235
  Description of Artificial Sequence: Synthetic oligonucleotide

SEQ ID NO: 238 - DNA, 30 bp, Artificial Sequence; identical to SEQ ID NO: 235
  Description of Artificial Sequence: Synthetic oligonucleotide

SEQ ID NO: 239 - DNA, 30 bp, Artificial Sequence; identical to SEQ ID NO: 235
  Description of Artificial Sequence: Synthetic oligonucleotide

SEQ ID NO: 240 - DNA, 30 bp, Artificial Sequence; identical to SEQ ID NO: 235
  Description of Artificial Sequence: Synthetic oligonucleotide

SEQ ID NO: 241 - DNA, 30 bp, Artificial Sequence; identical to SEQ ID NO: 235
  Description of Artificial Sequence: Synthetic oligonucleotide

SEQ ID NO: 242 - DNA, 30 bp, Artificial Sequence; identical to SEQ ID NO: 235
  Description of Artificial Sequence: Synthetic oligonucleotide

SEQ ID NO: 243 - DNA, 30 bp, Artificial Sequence; identical to SEQ ID NO: 235
  Description of Artificial Sequence: Synthetic oligonucleotide

SEQ ID NO: 244 - DNA, 30 bp, Artificial Sequence; identical to SEQ ID NO: 235
  Description of Artificial Sequence: Synthetic oligonucleotide

SEQ ID NO: 245 - DNA, 30 bp, Artificial Sequence; identical to SEQ ID NO: 235
  Description of Artificial Sequence: Synthetic oligonucleotide

SEQ ID NO: 246 - DNA, 30 bp, Artificial Sequence; identical to SEQ ID NO: 235
  Description of Artificial Sequence: Synthetic oligonucleotide

SEQ ID NO: 247 - DNA, 30 bp, Artificial Sequence; identical to SEQ ID NO: 235
  Description of Artificial Sequence: Synthetic oligonucleotide

SEQ ID NO: 248 - DNA, 30 bp, Artificial Sequence; identical to SEQ ID NO: 235
  Description of Artificial Sequence: Synthetic oligonucleotide

SEQ ID NO: 249 - DNA, 30 bp, Artificial Sequence
  Description of Artificial Sequence: Synthetic oligonucleotide
gattaaagaggagaaatactagagtactag

SEQ ID NO: 250 - DNA, 30 bp, Artificial Sequence
  Description of Artificial Sequence: Synthetic oligonucleotide
caccttcgggtgggcctttctgcgtttata

SEQ ID NO: 251 - DNA, 30 bp, Artificial Sequence; identical to SEQ ID NO: 250
  Description of Artificial Sequence: Synthetic oligonucleotide

SEQ ID NO: 252 - DNA, 30 bp, Artificial Sequence; identical to SEQ ID NO: 250
  Description of Artificial Sequence: Synthetic oligonucleotide

SEQ ID NO: 253 - DNA, 30 bp, Artificial Sequence; identical to SEQ ID NO: 250
  Description of Artificial Sequence: Synthetic oligonucleotide

SEQ ID NO: 254 - DNA, 30 bp, Artificial Sequence; identical to SEQ ID NO: 193
  Description of Artificial Sequence: Synthetic oligonucleotide

SEQ ID NO: 255 - DNA, 30 bp, Artificial Sequence
  Description of Artificial Sequence: Synthetic oligonucleotide
tgctagctactagagattaaagaggagaaa

SEQ ID NO: 256 - DNA, 30 bp, Artificial Sequence
  Description of Artificial Sequence: Synthetic oligonucleotide
ttgtgagcggataacaagatactgagcaca

SEQ ID NO: 257 - DNA, 30 bp, Artificial Sequence; identical to SEQ ID NO: 256
  Description of Artificial Sequence: Synthetic oligonucleotide

SEQ ID NO: 258 - DNA, 30 bp, Artificial Sequence; identical to SEQ ID NO: 256
  Description of Artificial Sequence: Synthetic oligonucleotide

SEQ ID NO: 259 - DNA, 30 bp, Artificial Sequence; identical to SEQ ID NO: 193
  Description of Artificial Sequence: Synthetic oligonucleotide

SEQ ID NO: 260 - DNA, 30 bp, Artificial Sequence; identical to SEQ ID NO: 194
  Description of Artificial Sequence: Synthetic oligonucleotide

SEQ ID NO: 261 - DNA, 30 bp, Artificial Sequence; identical to SEQ ID NO: 195
  Description of Artificial Sequence: Synthetic oligonucleotide

SEQ ID NO: 262 - DNA, 30 bp, Artificial Sequence; identical to SEQ ID NO: 196
  Description of Artificial Sequence: Synthetic oligonucleotide

SEQ ID NO: 263 - DNA, 30 bp, Artificial Sequence; identical to SEQ ID NO: 199
  Description of Artificial Sequence: Synthetic oligonucleotide

SEQ ID NO: 264 - DNA, 30 bp, Artificial Sequence; identical to SEQ ID NO: 206
  Description of Artificial Sequence: Synthetic oligonucleotide

SEQ ID NO: 265 - DNA, 30 bp, Artificial Sequence; identical to SEQ ID NO: 203
  Description of Artificial Sequence: Synthetic oligonucleotide

SEQ ID NO: 266 - DNA, 30 bp, Artificial Sequence; identical to SEQ ID NO: 210
  Description of Artificial Sequence: Synthetic oligonucleotide

SEQ ID NO: 267 - DNA, 30 bp, Artificial Sequence; identical to SEQ ID NO: 211
  Description of Artificial Sequence: Synthetic oligonucleotide

SEQ ID NO: 268 - DNA, 30 bp, Artificial Sequence
  Description of Artificial Sequence: Synthetic oligonucleotide
cctgtttttatgttattctctctgtaaagg

SEQ ID NO: 269 - DNA, 30 bp, Artificial Sequence
  Description of Artificial Sequence: Synthetic oligonucleotide
aaatatttgcttatacaatcttcctgtttt

SEQ ID NO: 270 - DNA, 30 bp, Artificial Sequence
  Description of Artificial Sequence: Synthetic oligonucleotide
gctgataaaccgatacaattaaaggctcct

SEQ ID NO: 271 - DNA, 30 bp, Artificial Sequence
  Description of Artificial Sequence: Synthetic oligonucleotide
ctcttctcagcgtcttaatctaagctatcg

SEQ ID NO: 272 - DNA, 30 bp, Artificial Sequence
  Description of Artificial Sequence: Synthetic oligonucleotide
atgagccagttcttaaaatcgcataaggta

SEQ ID NO: 273 - DNA, 30 bp, Artificial Sequence
  Description of Artificial Sequence: Synthetic oligonucleotide
ctattgattgtgacaaaataaacttattcc

SEQ ID NO: 274 - DNA, 30 bp, Artificial Sequence
  Description of Artificial Sequence: Synthetic oligonucleotide
gtttcgcgcttggtataatcgctgggggtc

SEQ ID NO: 275 - DNA, 30 bp, Artificial Sequence
  Description of Artificial Sequence: Synthetic oligonucleotide
ctttgcttctgactataatagtcagggtaa

SEQ ID NO: 276 - DNA, 30 bp, Artificial Sequence
  Description of Artificial Sequence: Synthetic oligonucleotide
aaaccgatacaattaaaggctcctgctagc

SEQ ID NO: 277 - DNA, 30 bp, Artificial Sequence
  Description of Artificial Sequence: Synthetic oligonucleotide
caccacactgatagtgctagtgtagatcac

SEQ ID NO: 278 - DNA, 30 bp, Artificial Sequence
  Description of Artificial Sequence: Synthetic oligonucleotide
gccggaataactccctataatgcgccacca

SEQ ID NO: 279 - DNA, 30 bp, Artificial Sequence
  Description of Artificial Sequence: Synthetic oligonucleotide
ttgacaagcttttcctcagctccgtaaact

SEQ ID NO: 280 - DNA, 30 bp, Artificial Sequence
  Description of Artificial Sequence: Synthetic oligonucleotide
gtttatacataggcgagtactctgttatgg

SEQ ID NO: 281 - DNA, 30 bp, Artificial Sequence
  Description of Artificial Sequence: Synthetic oligonucleotide
agaggttccaactttcaccataatgaaaca

SEQ ID NO: 282 - DNA, 30 bp, Artificial Sequence
  Description of Artificial Sequence: Synthetic oligonucleotide
ggtttcaaaattgtgatctatatttaacaa

SEQ ID NO: 283 - DNA, 30 bp, Artificial Sequence; identical to SEQ ID NO: 282
  Description of Artificial Sequence: Synthetic oligonucleotide

SEQ ID NO: 284 - DNA, 30 bp, Artificial Sequence
  Description of Artificial Sequence: Synthetic oligonucleotide
tctattccaataaagaaatcttcctgcgtg

SEQ ID NO: 285 - DNA, 30 bp, Artificial Sequence
  Description of Artificial Sequence: Synthetic oligonucleotide
gaccgaatatatagtggaaacgtttagatg

SEQ ID NO: 286 - DNA, 30 bp, Artificial Sequence
  Description of Artificial Sequence: Synthetic oligonucleotide
ccacatcctgtttttaaccttaaaatggca

SEQ ID NO: 287 - DNA, 30 bp, Artificial Sequence
  Description of Artificial Sequence: Synthetic oligonucleotide
aattgcagtaggcatgacaaaatggactca

SEQ ID NO: 288 - DNA, 30 bp, Artificial Sequence
  Description of Artificial Sequence: Synthetic oligonucleotide
caagcttttcctttataatagaatgaatga

SEQ ID NO: 289 - DNA, 30 bp, Artificial Sequence
  Description of Artificial Sequence: Synthetic oligonucleotide
tctaagctagtgtattttgcgtttaatagt

SEQ ID NO: 290 - DNA, 30 bp, Artificial Sequence
  Description of Artificial Sequence: Synthetic oligonucleotide
aatgggctcgtgttgtacaataaatgtagt

SEQ ID NO: 291 - DNA, 30 bp, Artificial Sequence
  Description of Artificial Sequence: Synthetic oligonucleotide
aaaaatgggctcgtgttgtacaataaatgt

SEQ ID NO: 292 - DNA, 30 bp, Artificial Sequence
  Description of Artificial Sequence: Synthetic oligonucleotide
aaaaaaagcgcgcgattatgtaaaatataa

SEQ ID NO: 293 - DNA, 30 bp, Artificial Sequence
  Description of Artificial Sequence: Synthetic oligonucleotide
atccttatcgttatgggtattgtttgtaat

SEQ ID NO: 294 - DNA, 30 bp, Artificial Sequence
  Description of Artificial Sequence: Synthetic oligonucleotide
taaaagaattgtgagcgggaatacaacaac

SEQ ID NO: 295 - DNA, 30 bp, Artificial Sequence; identical to SEQ ID NO: 292
  Description of Artificial Sequence: Synthetic oligonucleotide

SEQ ID NO: 296 - DNA, 30 bp, Artificial Sequence
  Description of Artificial Sequence: Synthetic oligonucleotide
agggaatacaagctacttgttctttttgca

SEQ ID NO: 297 - DNA, 23 bp, Artificial Sequence
  Description of Artificial Sequence: Synthetic oligonucleotide
taatacgactcactatagggaga

SEQ ID NO: 298 - DNA, 28 bp, Artificial Sequence
  Description of Artificial Sequence: Synthetic oligonucleotide
gaatttaatacgactcactatagggaga

SEQ ID NO: 299 - DNA, 19 bp, Artificial Sequence
  Description of Artificial Sequence: Synthetic oligonucleotide
taatacgactcactatagg

SEQ ID NO: 300 - DNA, 30 bp, Artificial Sequence
  Description of Artificial Sequence: Synthetic oligonucleotide
gagtcgtattaatacgactcactatagggg

SEQ ID NO: 301 - DNA, 30 bp, Artificial Sequence
  Description of Artificial Sequence: Synthetic oligonucleotide
agtgagtcgtactacgactcactatagggg

SEQ ID NO: 302 - DNA, 30 bp, Artificial Sequence
  Description of Artificial Sequence: Synthetic oligonucleotide
gagtcgtattaatacgactctctatagggg

SEQ ID NO: 303 - DNA, 18 bp, Artificial Sequence
  Description of Artificial Sequence: Synthetic oligonucleotide
taatacgactcactatag

SEQ ID NO: 304 - DNA, 23 bp, Artificial Sequence
  Description of Artificial Sequence: Synthetic oligonucleotide
taatacgactcactatagggaga

SEQ ID NO: 305 - DNA, 23 bp, Artificial Sequence
  Description of Artificial Sequence: Synthetic oligonucleotide
ttatacgactcactatagggaga

SEQ ID NO: 306 - DNA, 23 bp, Artificial Sequence
  Description of Artificial Sequence: Synthetic oligonucleotide
gaatacgactcactatagggaga

SEQ ID NO: 307 - DNA, 23 bp, Artificial Sequence
  Description of Artificial Sequence: Synthetic oligonucleotide
taatacgtctcactatagggaga

SEQ ID NO: 308 - DNA, 23 bp, Artificial Sequence
  Description of Artificial Sequence: Synthetic oligonucleotide
tcatacgactcactatagggaga

SEQ ID NO: 309 - DNA, 30 bp, Artificial Sequence
  Description of Artificial Sequence: Synthetic oligonucleotide
taatacgactcactatagggagaccacaac

SEQ ID NO: 310 - DNA, 30 bp, Artificial Sequence
  Description of Artificial Sequence: Synthetic oligonucleotide
taattgaactcactaaagggagaccacagc

SEQ ID NO: 311 - DNA, 30 bp, Artificial Sequence
  Description of Artificial Sequence: Synthetic oligonucleotide
cgaagtaatacgactcactattagggaaga

SEQ ID NO: 312 - DNA, 19 bp, Artificial Sequence
  Description of Artificial Sequence: Synthetic oligonucleotide
atttaggtgacactataga

SEQ ID NO: 313 - DNA, 30 bp, Artificial Sequence
  Description of Artificial Sequence: Synthetic oligonucleotide
tacaaaataattcccctgcaaacattatca

SEQ ID NO: 314 - DNA, 30 bp, Artificial Sequence
  Description of Artificial Sequence: Synthetic oligonucleotide
tacaaaataattcccctgcaaacattatcg

SEQ ID NO: 315 - DNA, 30 bp, Artificial Sequence
  Description of Artificial Sequence: Synthetic oligonucleotide
gatacaggatacagcggaaacaacttttaa

SEQ ID NO: 316 - DNA, 30 bp, Artificial Sequence
  Description of Artificial Sequence: Synthetic oligonucleotide
tttcaagctataccaagcatacaatcaact

SEQ ID NO: 317 - DNA, 30 bp, Artificial Sequence
  Description of Artificial Sequence: Synthetic oligonucleotide
cctttgcagcataaattactatacttctat

SEQ ID NO: 318 - DNA, 30 bp, Artificial Sequence; identical to SEQ ID NO: 317
  Description of Artificial Sequence: Synthetic oligonucleotide

SEQ ID NO: 319 - DNA, 30 bp, Artificial Sequence; identical to SEQ ID NO: 317
  Description of Artificial Sequence: Synthetic oligonucleotide

SEQ ID NO: 320 - DNA, 30 bp, Artificial Sequence; identical to SEQ ID NO: 317
  Description of Artificial Sequence: Synthetic oligonucleotide

SEQ ID NO: 321 - DNA, 30 bp, Artificial Sequence; identical to SEQ ID NO: 317
  Description of Artificial Sequence: Synthetic oligonucleotide

SEQ ID NO: 322 - DNA, 30 bp, Artificial Sequence
  Description of Artificial Sequence: Synthetic oligonucleotide
ttatctactttttacaacaaatataaaaca

SEQ ID NO: 323 - DNA, 30 bp, Artificial Sequence
  Description of Artificial Sequence: Synthetic oligonucleotide
acaaacacaaatacacacactaaattaata

SEQ ID NO: 324 - DNA, 30 bp, Artificial Sequence
  Description of Artificial Sequence: Synthetic oligonucleotide
gtttcgaataaacacacataaacaaacaaa

SEQ ID NO: 325 - DNA, 30 bp, Artificial Sequence
  Description of Artificial Sequence: Synthetic oligonucleotide
ccaagcatacaatcaactatctcatataca

SEQ ID NO: 326 - DNA, 30 bp, Artificial Sequence
  Description of Artificial Sequence: Synthetic oligonucleotide
accatcaaaggaagctttaatcttctcata

SEQ ID NO: 327 - DNA, 30 bp, Artificial Sequence; identical to SEQ ID NO: 323
  Description of Artificial Sequence: Synthetic oligonucleotide

SEQ ID NO: 328 - DNA, 30 bp, Artificial Sequence; identical to SEQ ID NO: 325
  Description of Artificial Sequence: Synthetic oligonucleotide

SEQ ID NO: 329 - DNA, 30 bp, Artificial Sequence
  Description of Artificial Sequence: Synthetic oligonucleotide
agaacccactgcttactggcttatcgaaat

SEQ ID NO: 330 - DNA, 30 bp, Artificial Sequence
  Description of Artificial Sequence: Synthetic oligonucleotide
ggccgtttttggcttttttgttagacgaag

SEQ ID NO: 331 - DNA, 66 bp, Artificial Sequence
  Description of Artificial Sequence: Synthetic oligonucleotide
ataagtgccttcccatcaaaaaaatattctcaacataaaaaactttgtgtaatacttgtaacgcta

SEQ ID NO: 332 - DNA, 52 bp, Artificial Sequence
  Description of Artificial Sequence: Synthetic oligonucleotide
aaaaagagtattgacttcgcatctttttgtacctataatagattcattgcta

SEQ ID NO: 333 - DNA, 59 bp, Artificial Sequence
  Description of Artificial Sequence: Synthetic oligonucleotide
ggaaaatttttttaaaaaaaaaactttacagctagctcagtcctaggtattatgctagc

SEQ ID NO: 334 - DNA, 59 bp, Artificial Sequence
  Description of Artificial Sequence: Synthetic oligonucleotide
ggaaaatttttttaaaaaaaaaactttacggctagctcagccctaggtattatgctagc

SEQ ID NO: 335 - DNA, 64 bp, Artificial Sequence
  Description of Artificial Sequence: Synthetic oligonucleotide
ggaaaatttttttaaaaaaaaaacttgacagctagctcagtccttggtataatgctagcacgaa

SEQ ID NO: 336 - DNA, 28 bp, Artificial Sequence
  Description of Artificial Sequence: Synthetic oligonucleotide
  modified_base (13)..(15): a, c, t, g, unknown or other
  modified_base (18)..(20): a, c, t, g, unknown or other
tctagagaaagannngannnactagatg

SEQ ID NO: 337 - DNA, 28 bp, Artificial Sequence
  Description of Artificial Sequence: Synthetic oligonucleotide
tctagagaaagaggggacaaactagatg

SEQ ID NO: 338 - DNA, 28 bp, Artificial Sequence
  Description of Artificial Sequence: Synthetic oligonucleotide
tctagagaaagacaggacccactagatg

SEQ ID NO: 339 - DNA, 28 bp, Artificial Sequence
  Description of Artificial Sequence: Synthetic oligonucleotide
tctagagaaagatccgatgtactagatg

SEQ ID NO: 340 - DNA, 28 bp, Artificial Sequence
  Description of Artificial Sequence: Synthetic oligonucleotide
tctagagaaagattagacaaactagatg

SEQ ID NO: 341 - DNA, 28 bp, Artificial Sequence
  Description of Artificial Sequence: Synthetic oligonucleotide
tctagagaaagaagggacagactagatg

SEQ ID NO: 342 - DNA, 28 bp, Artificial Sequence
  Description of Artificial Sequence: Synthetic oligonucleotide
tctagagaaagacatgacgtactagatg

SEQ ID NO: 343 - DNA, 28 bp, Artificial Sequence
  Description of Artificial Sequence: Synthetic oligonucleotide
tctagagaaagataggagacactagatg

SEQ ID NO: 344 - DNA, 28 bp, Artificial Sequence
  Description of Artificial Sequence: Synthetic oligonucleotide
tctagagaaagaagagactcactagatg

SEQ ID NO: 345 - DNA, 28 bp, Artificial Sequence
  Description of Artificial Sequence: Synthetic oligonucleotide
tctagagaaagacgagatatactagatg

SEQ ID NO: 346 - DNA, 28 bp, Artificial Sequence
  Description of Artificial Sequence: Synthetic oligonucleotide
tctagagaaagactggagacactagatg

SEQ ID NO: 347 - DNA, 28 bp, Artificial Sequence
  Description of Artificial Sequence: Synthetic oligonucleotide
tctagagaaagaggcgaattactagatg

SEQ ID NO: 348 - DNA, 28 bp, Artificial Sequence
  Description of Artificial Sequence: Synthetic oligonucleotide
tctagagaaagaggcgatacactagatg

SEQ ID NO: 349 - DNA, 28 bp, Artificial Sequence
  Description of Artificial Sequence: Synthetic oligonucleotide
tctagagaaagaggtgacatactagatg

SEQ ID NO: 350 - DNA, 28 bp, Artificial Sequence
  Description of Artificial Sequence: Synthetic oligonucleotide
tctagagaaagagtggaaaaactagatg

SEQ ID NO: 351 - DNA, 28 bp, Artificial Sequence
  Description of Artificial Sequence: Synthetic oligonucleotide
tctagagaaagatgagaagaactagatg

SEQ ID NO: 352 - DNA, 28 bp, Artificial Sequence
  Description of Artificial Sequence: Synthetic oligonucleotide
tctagagaaagaagggatacactagatg

SEQ ID NO: 353 - DNA, 28 bp, Artificial Sequence
  Description of Artificial Sequence: Synthetic oligonucleotide
tctagagaaagacatgaggcactagatg

SEQ ID NO: 354 - DNA, 28 bp, Artificial Sequence
  Description of Artificial Sequence: Synthetic oligonucleotide
tctagagaaagacatgagttactagatg

SEQ ID NO: 355 - DNA, 28 bp, Artificial Sequence
  Description of Artificial Sequence: Synthetic oligonucleotide
tctagagaaagagacgaatcactagatg

SEQ ID NO: 356 - DNA, 28 bp, Artificial Sequence
  Description of Artificial Sequence: Synthetic oligonucleotide
tctagagaaagatttgatatactagatg

SEQ ID NO: 357 - DNA, 28 bp, Artificial Sequence
  Description of Artificial Sequence: Synthetic oligonucleotide
tctagagaaagacgcgagaaactagatg

SEQ ID NO: 358 - DNA, 28 bp, Artificial Sequence
  Description of Artificial Sequence: Synthetic oligonucleotide
tctagagaaagagacgagtcactagatg

SEQ ID NO: 359 - DNA, 28 bp, Artificial Sequence
  Description of Artificial Sequence: Synthetic oligonucleotide
tctagagaaagagaggagccactagatg

SEQ ID NO: 360 - DNA, 28 bp, Artificial Sequence
  Description of Artificial Sequence: Synthetic oligonucleotide
tctagagaaagagatgactaactagatg

SEQ ID NO: 361 - DNA, 28 bp, Artificial Sequence
  Description of Artificial Sequence: Synthetic oligonucleotide
tctagagaaagagccgacatactagatg

SEQ ID NO: 362 - DNA, 28 bp, Artificial Sequence
  Description of Artificial Sequence: Synthetic oligonucleotide
tctagagaaagagccgagttactagatg

SEQ ID NO: 363 - DNA, 28 bp, Artificial Sequence
  Description of Artificial Sequence: Synthetic oligonucleotide
tctagagaaagaggtgactcactagatg

SEQ ID NO: 364 - DNA, 28 bp, Artificial Sequence
  Description of Artificial Sequence: Synthetic oligonucleotide
tctagagaaagagtggaactactagatg

SEQ ID NO: 365 - DNA, 28 bp, Artificial Sequence
  Description of Artificial Sequence: Synthetic oligonucleotide
tctagagaaagataggactcactagatg

SEQ ID NO: 366 - DNA, 28 bp, Artificial Sequence
  Description of Artificial Sequence: Synthetic oligonucleotide
tctagagaaagattggacgtactagatg

SEQ ID NO: 367 - DNA, 28 bp, Artificial Sequence
  Description of Artificial Sequence: Synthetic oligonucleotide
tctagagaaagaaacgacatactagatg

SEQ ID NO: 368 - DNA, 28 bp, Artificial Sequence
  Description of Artificial Sequence: Synthetic oligonucleotide
tctagagaaagaaccgaattactagatg

SEQ ID NO: 369 - DNA, 28 bp, Artificial Sequence
  Description of Artificial Sequence: Synthetic oligonucleotide
tctagagaaagacaggattaactagatg

SEQ ID NO: 370 - DNA, 28 bp, Artificial Sequence
  Description of Artificial Sequence: Synthetic oligonucleotide
tctagagaaagacccgagacactagatg

SEQ ID NO: 371 - DNA, 28 bp, Artificial Sequence
  Description of Artificial Sequence: Synthetic oligonucleotide
tctagagaaagaccggaaatactagatg

SEQ ID NO: 372 - DNA, 28 bp, Artificial Sequence
  Description of Artificial Sequence: Synthetic oligonucleotide
tctagagaaagaccggagacactagatg

SEQ ID NO: 373 - DNA, 28 bp, Artificial Sequence
  Description of Artificial Sequence: Synthetic oligonucleotide
tctagagaaagagctgagcaactagatg

SEQ ID NO: 374 - DNA, 28 bp, Artificial Sequence
  Description of Artificial Sequence: Synthetic oligonucleotide
tctagagaaagagtagatcaactagatg

SEQ ID NO: 375 - DNA, 28 bp, Artificial Sequence
  Description of Artificial Sequence: Synthetic oligonucleotide
tctagagaaagatatgaataactagatg

SEQ ID NO: 376 - DNA, 28 bp, Artificial Sequence
  Description of Artificial Sequence: Synthetic oligonucleotide
tctagagaaagattagagtcactagatg

SEQ ID NO: 377 - DNA, 31 bp, Artificial Sequence
  Description of Artificial Sequence: Synthetic oligonucleotide
tctagagttcacacaggaaacctactagatg

SEQ ID NO: 378 - DNA, 31 bp, Artificial Sequence
  Description of Artificial Sequence: Synthetic oligonucleotide
tctagagattaaagaggagaaatactagatg

SEQ ID NO: 379 - DNA, 30 bp, Artificial Sequence
  Description of Artificial Sequence: Synthetic oligonucleotide
tctagagtcacacaggaaacctactagatg

SEQ ID NO: 380 - DNA, 29 bp, Artificial Sequence
  Description of Artificial Sequence: Synthetic oligonucleotide
tctagagtcacacaggaaagtactagatg

SEQ ID NO: 381 - DNA, 27 bp, Artificial Sequence
  Description of Artificial Sequence: Synthetic oligonucleotide
tctagagtcacacaggactactagatg

SEQ ID NO: 382 - DNA, 28 bp, Artificial Sequence
  Description of Artificial Sequence: Synthetic oligonucleotide
tctagagaaagaggagaaatactagatg

SEQ ID NO: 383 - DNA, 30 bp, Artificial Sequence
  Description of Artificial Sequence: Synthetic oligonucleotide
tctagagattaaagaggagaatactagatg

SEQ ID NO: 384 - DNA, 28 bp, Artificial Sequence
  Description of Artificial Sequence: Synthetic oligonucleotide
tctagagaaagaggggaaatactagatg

SEQ ID NO: 385 - protein, 21 aa, Artificial Sequence
  Description of Artificial Sequence: Synthetic peptide
MKQSTIALALLPLLFTPVTKA

SEQ ID NO: 386 - protein, 20 aa, Artificial Sequence
  Description of Artificial Sequence: Synthetic peptide
KQSTIALALLPLLFTPVTKA

SEQ ID NO: 387 - protein, 22 aa, Artificial Sequence
  Description of Artificial Sequence: Synthetic peptide
MMKRNILAVIVPALLVAGTANA

SEQ ID NO: 388 - protein, 15 aa, Artificial Sequence
  Description of Artificial Sequence: Synthetic peptide
MRTLTLNELDSVSGG

SEQ ID NO: 389 - protein, 43 aa, Artificial Sequence
  Description of Artificial Sequence: Synthetic polypeptide
MNNNDLFQASRRRFLAQLGGLTVAGMLGTSLLTPRRATAAQAA

SEQ ID NO: 390 - protein, 33 aa, Artificial Sequence
  Description of Artificial Sequence: Synthetic polypeptide
MDVSRRQFFKICAGGMAGTTVAALGFAPKQALA

SEQ ID NO: 391 - protein, 45 aa, Artificial Sequence
  Description of Artificial Sequence: Synthetic polypeptide
MKTKIPDAVLAAEVSRRGLVKTTAIGGLAMASSALTLPFSRIAHA

SEQ ID NO: 392 - protein, 21 aa, Artificial Sequence
  Description of Artificial Sequence: Synthetic peptide
KYLLPTAAAGLLLLAAQPAMA

SEQ ID NO: 393 - protein, 52 aa, Artificial Sequence
  Description of Artificial Sequence: Synthetic polypeptide
LNPLINEISKIISAAGNFDVKEERAAASLLQLSGNASDFSYGRNSITLTASA

SEQ ID NO: 394 - DNA, 159 bp, Artificial Sequence
  Description of Artificial Sequence: Synthetic polynucleotide
cttaatccattaattaatgaaatcagcaaaatcatttcagctgcaggtaattttgatgttaaagaggaaagagctgcagcttctttattgcagttgtccggtaatgccagtgatttttcatatggacggaactcaataactttgacagcatcagcataa

SEQ ID NO: 395 - protein, 52 aa, Artificial Sequence
  Description of Artificial Sequence: Synthetic polypeptide
MKRHLNTSYRLVWNHITGAFVVASELARARGKRAGVAVALSLAAATSLPALA

SEQ ID NO: 396 - protein, 40 aa, Artificial Sequence
  Description of Artificial Sequence: Synthetic polypeptide
MFWRDMTLSVWRKKTTGLKTKKRLLALVLAAALCSSPVWA

SEQ ID NO: 397 - protein, 33 aa, Artificial Sequence
  Description of Artificial Sequence: Synthetic polypeptide
MGYKMNISSLRKAFIFMGAVAALSLVNAQSALA

SEQ ID NO: 398 - protein, 53 aa, Artificial Sequence
  Description of Artificial Sequence: Synthetic polypeptide
MNKIFKVIWNPATGSYTVASETAKSRGKKSGRSKLLISALVAGGLLSSFGASA

SEQ ID NO: 399 - DNA, 7878 bp, Artificial Sequence
  Description of Artificial Sequence: Synthetic polynucleotide
atggatttaaattctaaaaaatatcagatgcttaaagagctatatgtaagcttcgctgaaaatgaagttaaacctttagcaacagaacttgatgaagaagaaagatttccttatgaaacagtggaaaaaatggcaaaagcaggaatgatgggtataccatatccaaaagaatatggtggagaaggtggagacactgtaggatatataatggcagttgaagaattgtctagagtttgtggtactacaggagttatattatcagctcatacatctcttggctcatggcctatatatcaatatggtaatgaagaacaaaaacaaaaattcttaagaccactagcaagtggagaaaaattaggagcatttggtcttactgagcctaatgctggtacagatgcgtctggccaacaaacaactgctgttttagacggggatgaatacatacttaatggctcaaaaatatttataacaaacgcaatagctggtgacatatatgtagtaatggcaatgactgataaatctaaggggaacaaaggaatatcagcatttatagttgaaaaaggaactcctgggtttagctttggagttaaagaaaagaaaatgggtataagaggttcagctacgagtgaattaatatttgaggattgcagaatacctaaagaaaatttacttggaaaagaaggtcaaggatttaagatagcaatgtctactcttgatggtggtagaattggtatagctgcacaagctttaggtttagcacaaggtgctcttgatgaaactgttaaatatgtaaaagaaagagtacaatttggtagaccattatcaaaattccaaaatacacaattccaattagctgatatggaagttaaggtacaagcggctagacaccttgtatatcaagcagctataaataaagacttaggaaaaccttatggagtagaagcagcaatggcaaaattatttgcagctgaaacagctatggaagttactacaaaagctgtacaacttcatggaggatatggatacactcgtgactatccagtagaaagaatgatgagagatgctaagataactgaaatatatgaaggaactagtgaagttcaaagaatggttatttcaggaaaactattaaaatagtaagaaggagatatacatatggaggaaggatttatgaatatagtcgtttgtataaaacaagttccagatacaacagaagttaaactagatcctaatacaggtactttaattagagatggagtaccaagtataataaaccctgatgataaagcaggtttagaagaagctataaaattaaaagaagaaatgggtgctcatgtaactgttataacaatgggacctcctcaagcagatatggctttaaaagaagctttagcaatgggtgcagatagaggtatattattaacagatagagcatttgcgggtgctgatacttgggcaacttcatcagcattagcaggagcattaaaaaatatagattttgatattataatagctggaagacaggcgatagatggagatactgcacaagttggacctcaaatagctgaacatttaaatcttccatcaataacatatgctgaagaaataaaaactgaaggtgaatatgtattagtaaaaagacaatttgaagattgttgccatgacttaaaagttaaaatgccatgccttataacaactcttaaagatatgaacacaccaagatacatgaaagttggaagaatatatgatgctttcgaaaatgatgtagtagaaacatggactgtaaaagatatagaagttgacccttctaatttaggtcttaaaggttctccaactagtgtatttaaatcatttacaaaatcagttaaaccagctggtacaatatacaatgaagatgcgaaaacatcagctggaattatcatagataaattaaaagagaagtatatcatataataagaaggagatatacatatgggtaacgttttagtagtaatagaacaaagagaaaatgtaattcaaactgtttctttagaattactaggaaaggctacagaaatagcaaaagattatgatacaaaagtttctgcattacttttaggtagtaaggtagaaggtttaatagatacattagcacactatggtgcagatgaggtaatagtagtagatgatgaagctttagcagtgtatacaactgaaccatatacaaaagcagcttatgaagcaataaaagcagctgaccctatagttgtattatttggtgcaacttcaataggtagagatttagcgcctagagtttctgctagaatacatacaggtcttactgctgactgtacaggtcttgcagtagctgaagatacaaaattattattaatgacaagacctgcctttggtggaaatataatggcaacaatagtttgtaaagatttcagacctcaaatgtctacagttagaccaggggttatgaagaaaaatgaacctgatgaaactaaagaagctgtaattaaccgtttcaaggtagaatttaatgatgctgataaattagttcaagttgtacaagtaataaaagaagctaaaaaacaagttaaaatagaagatgctaagatattagtttctgctggacgtggaatgggtggaaaagaaaacttagacatactttatgaattagctgaaattataggtggagaagtttctggttctcgtgccactatagatgcaggttggttagataaagcaagacaagttggtcaaactggtaaaactgtaagaccagacctttatatagcatgtggtatatctggagcaatacaacatatagctggtatggaagatgctgagtttatagttgctataaataaaaatccagaagctccaatatttaaatatgctgatgttggtatagttggagatgttcataaagtgcttccagaacttatcagtcagttaagtgttgcaaaagaaaaaggtgaagttttagctaactaataagaaggagatatacatatgagagaagtagtaattgccagtgcagctagaacagcagtaggaagttttggaggagcatttaaatcagtttcagcggtagagttaggggtaacagcagctaaagaagctataaaaagagctaacataactccagatatgatagatgaatctcttttagggggagtacttacagcaggtcttggacaaaatatagcaagacaaatagcattaggagcaggaataccagtagaaaaaccagctatgactataaatatagtttgtggttctggattaagatctgtttcaatggcatctcaacttatagcattaggtgatgctgatataatgttagttggtggagctgaaaacatgagtatgtctccttatttagtaccaagtgcgagatatggtgcaagaatgggtgatgctgcttttgttgattcaatgataaaagatggattatcagacatatttaataactatcacatgggtattactgctgaaaacatagcagagcaatggaatataactagagaagaacaagatgaattagctcttgcaagtcaaaataaagctgaaaaagctcaagctgaaggaaaatttgatgaagaaatagttcctgttgttataaaaggaagaaaaggtgacactgtagtagataaagatgaatatattaagcctggcactacaatggagaaacttgctaagttaagacctgcatttaaaaaagatggaacagttactgctggtaatgcatcaggaataaatgatggtgctgctatgttagtagtaatggctaaagaaaaagctgaagaactaggaatagagcctcttgcaactatagtttcttatggaacagctggtgttgaccctaaaataatgggatatggaccagttccagcaactaaaaaagctttagaagctgctaatatgactattgaagatatagatttagttgaagctaatgaggcatttgctgcccaatctgtagctgtaataagagacttaaatatagatatgaataaagttaatgttaatggtggagcaatagctataggacatccaataggatgctcaggagcaagaatacttactacacttttatatgaaatgaagagaagagatgctaaaactggtcttgctacactttgtataggcggtggaatgggaactactttaatagttaagagatagtaagaaggagatatacatatgaaattagctgtaataggtagtggaactatgggaagtggtattgtacaaacttttgcaagttgtggacatgatgtatgtttaaagagtagaactcaaggtgctatagataaatgtttagctttattagataaaaatttaactaagttagttactaagggaaaaatggatgaagctacaaaagcagaaatattaagtcatgttagttcaactactaattatgaagatttaaaagatatggatttaataatagaagcatctgtagaagacatgaatataaagaaagatgttttcaagttactagatgaattatgtaaagaagatactatcttggcaacaaatacttcatcattatctataacagaaatagcttcttctactaagcgcccagataaagttataggaatgcatttctttaatccagttcctatgatgaaattagttgaagttataagtggtcagttaacatcaaaagttacttttgatacagtatttgaattatctaagagtatcaataaagtaccagtagatgtatctgaatctcctggatttgtagtaaatagaatacttatacctatgataaatgaagctgttggtatatatgcagatggtgttgcaagtaaagaagaaatagatgaagctatgaaattaggagcaaaccatccaatgggaccactagcattaggtgatttaatcggattagatgttgttttagctataatgaacgttttatatactgaatttggagatactaaatatagacctcatccacttttagctaaaatggttagagctaatcaattaggaagaaaaactaagataggattctatgattataataaataataagaaggagatatacatatgagtacaagtgatgttaaagtttatgagaatgtagctgttgaagtagatggaaatatatgtacagtgaaaatgaatagacctaaagcccttaatgcaataaattcaaagactttagaagaactttatgaagtatttgtagatattaataatgatgaaactattgatgttgtaatattgacaggggaaggaaaggcatttgtagctggagcagatattgcatacatgaaagatttagatgctgtagctgctaaagattttagtatcttaggagcaaaagcttttggagaaatagaaaatagtaaaaaagtagtgatagctgctgtaaacggatttgctttaggtggaggatgtgaacttgcaatggcatgtgatataagaattgcatctgctaaagctaaatttggtcagccagaagtaactcttggaataactccaggatatggaggaactcaaaggcttacaagattggttggaatggcaaaagcaaaagaattaatctttacaggtcaagttataaaagctgatgaagctgaaaaaatagggctagtaaatagagtcgttgagccagacattttaatagaagaagttgagaaattagctaagataatagctaaaaatgctcagcttgcagttagatactctaaagaagcaatacaacttggtgctcaaactgatataaatactggaatagatatagaatctaatttatttggtctttgtttttcaactaaagaccaaaaagaaggaatgtcagctttcgttgaaaagagagaagctaactttataaaagggtaataagaaggagatatacatatgagaagttttgaagaagtaattaagtttgcaaaagaaagaggacctaaaactatatcagtagcatgttgccaagataaagaagttttaatggcagttgaaatggctagaaaagaaaaaatagcaaatgccattttagtaggagatatagaaaagactaaagaaattgcaaaaagcatagacatggatatcgaaaattatgaactgatagatataaaagatttagcagaagcatctctaaaatctgttgaattagtttcacaaggaaaagccgacatggtaatgaaaggcttagtagacacatcaataatactaaaagcagttttaaataaagaagtaggtcttagaactggaaatgtattaagtcacgtagcagtatttgatgtagagggatatgatagattatttttcgtaactgacgcagctatgaacttagctcctgatacaaatactaaaaagcaaatcatagaaaatgcttgcacagtagcacattcattagatataagtgaaccaaaagttgctgcaatatgcgcaaaagaaaaagtaaatccaaaaatgaaagatacagttgaagctaaagaactagaagaaatgtatgaaagaggagaaatcaaaggttgtatggttggtgggccttttgcaattgataatgcagtatctttagaagcagctaaacataaaggtataaatcatcctgtagcaggacgagctgatatattattagccccagatattgaaggtggtaacatattatataaagctttggtattcttctcaaaatcaaaaaatgcaggagttatagttggggctaaagcaccaataatattaacttctagagcagacagtgaagaaactaaactaaactcaatagctttaggtgttttaatggcagcaaaggcataataagaaggagatatacatatgagcaaaatatttaaaatcttaacaataaatcctggttcgacatcaactaaaatagctgtatttgataatgaggatttagtatttgaaaaaactttaagacattcttcagaagaaataggaaaatatgagaaggtgtctgaccaatttgaatttcgtaaacaagtaatagaagaagctctaaaagaaggtggagtaaaaacatctgaattagatgctgtagtaggtagaggaggacttcttaaacctataaaaggtggtacttattcagtaagtgctgctatgattgaagatttaaaagtgggagttttaggagaacacgcttcaaacctaggtggaataatagcaaaacaaataggtgaagaagtaaatgttccttcatacatagtagaccctgttgttgtagatgaattagaagatgttgctagaatttctggtatgcctgaaataagtagagcaagtgtagtacatgctttaaatcaaaaggcaatagcaagaagatatgctagagaaataaacaagaaatatgaagatataaatcttatagttgcacacatgggtggaggagtttctgttggagctcataaaaatggtaaaatagtagatgttgcaaacgcattagatggagaaggacctttctctccagaaagaagtggtggactaccagtaggtgcattagtaaaaatgtgctttagtggaaaatatactcaagatgaaattaaaaagaaaataaaaggtaatggcggactagttgcatacttaaacactaatgatgctagagaagttgaagaaagaattgaagctggtgatgaaaaagctaaattagtatatgaagctatggcatatcaaatctctaaagaaataggagctagtgctgcagttcttaagggagatgtaaaagcaatattattaactggtggaatcgcatattcaaaaatgtttacagaaatgattgcagatagagttaaatttatagcagatgtaaaagtttatccaggtgaagatgaaatgattgcattagctcaaggtggacttagagttttaactggtgaagaagaggctcaagtttatgataactaataa

SEQ ID NO: 400 - DNA, 6090 bp, Artificial Sequence
  Description of Artificial Sequence: Synthetic polynucleotide
atgatcgtaaaacctatggtacgcaacaatatctgcctgaacgcccatcctcagggctgcaagaagggagtggaagatcagattgaatataccaagaaacgcattaccgcagaagtcaaagctggcgcaaaagctccaaaaaacgttctggtgcttggctgctcaaatggttacggcctggcgagccgcattactgctgcgttcggatacggggctgcgaccatcggcgtgtcctttgaaaaagcgggttcagaaaccaaatatggtacaccgggatggtacaataatttggcatttgatgaagcggcaaaacgcgagggtctttatagcgtgacgatcgacggcgatgcgttttcagacgagatcaaggcccaggtaattgaggaagccaaaaaaaaaggtatcaaatttgatctgatcgtatacagcttggccagcccagtacgtactgatcctgatacaggtatcatgcacaaaagcgttttgaaaccctttggaaaaacgttcacaggcaaaacagtagatccgtttactggcgagctgaaggaaatctccgcggaaccagcaaatgacgaggaagcagccgccactgttaaagttatggggggtgaagattgggaacgttggattaagcagctgtcgaaggaaggcctcttagaagaaggctgtattaccttggcctatagttatattggccctgaagctacccaagctttgtaccgtaaaggcacaatcggcaaggccaaagaacacctggaggccacagcacaccgtctcaacaaagagaacccgtcaatccgtgccttcgtgagcgtgaataaaggcctggtaacccgcgcaagcgccgtaatcccggtaatccctctgtatctcgccagcttgttcaaagtaatgaaagagaagggcaatcatgaaggttgtattgaacagatcacgcgtctgtacgccgagcgcctgtaccgtaaagatggtacaattccagttgatgaggaaaatcgcattcgcattgatgattgggagttagaagaagacgtccagaaagcggtatccgcgttgatggagaaagtcacgggtgaaaacgcagaatctctcactgacttagcggggtaccgccatgatttcttagctagtaacggctttgatgtagaaggtattaattatgaagcggaagttgaacgcttcgaccgtatctgataagaaggagatatacatatgagagaagtagtaattgccagtgcagctagaacagcagtaggaagttttggaggagcatttaaatcagtttcagcggtagagttaggggtaacagcagctaaagaagctataaaaagagctaacataactccagatatgatagatgaatctcttttagggggagtacttacagcaggtcttggacaaaatatagcaagacaaatagcattaggagcaggaataccagtagaaaaaccagctatgactataaatatagtttgtggttctggattaagatctgtttcaatggcatctcaacttatagcattaggtgatgctgatataatgttagttggtggagctgaaaacatgagtatgtctccttatttagtaccaagtgcgagatatggtgcaagaatgggtgatgctgcttttgttgattcaatgataaaagatggattatcagacatatttaataactatcacatgggtattactgctgaaaacatagcagagcaatggaatataactagagaagaacaagatgaattagctcttgcaagtcaaaataaagctgaaaaagctcaagctgaaggaaaatttgatgaagaaatagttcctgttgttataaaaggaagaaaaggtgacactgtagtagataaagatgaatatattaagcctggcactacaatggagaaacttgctaagttaagacctgcatttaaaaaagatggaacagttactgctggtaatgcatcaggaataaatgatggtgctgctatgttagtagtaatggctaaagaaaaagctgaagaactaggaatagagcctcttgcaactatagtttcttatggaacagctggtgttgaccctaaaataatgggatatggaccagttccagcaactaaaaaagctttagaagctgctaatatgactattgaagatatagatttagttgaagctaatgaggcatttgctgcccaatctgtagctgtaataagagacttaaatatagatatgaataaagttaatgttaatggtggagcaatagctataggacatccaataggatgctcaggagcaagaatacttactacacttttatatgaaatgaagagaagagatgctaaaactggtcttgctacactttgtataggcggtggaatgggaactactttaatagttaagagatagtaagaaggagatatacatatgaaattagctgtaataggtagtggaactatgggaagtggtattgtacaaacttttgcaagttgtggacatgatgtatgtttaaagagtagaactcaaggtgctatagataaatgtttagctttattagataaaaatttaactaagttagttactaagggaaaaatggatgaagctacaaaagcagaaatattaagtcatgttagttcaactactaattatgaagatttaaaagatatggatttaataatagaagcatctgtagaagacatgaatataaagaaagatgttttcaagttactagatgaattatgtaaagaagatactatcttggcaacaaatacttcatcattatctataacagaaatagcttcttctactaagcgcccagataaagttataggaatgcatttctttaatccagttcctatgatgaaattagttgaagttataagtggtcagttaacatcaaaagttacttttgatacagtatttgaattatctaagagtatcaataaagtaccagtagatgtatctgaatctcctggatttgtagtaaatagaatacttatacctatgataaatgaagctgttggtatatatgcagatggtgttgcaagtaaagaagaaatagatgaagctatgaaattaggagcaaaccatccaatgggaccactagcattaggtgatttaatcggattagatgttgttttagctataatgaacgttttatatactgaatttggagatactaaatatagacctcatccacttttagctaaaatggttagagctaatcaattaggaagaaaaactaagataggattctatgattataataaataataagaaggagatatacatatgagtacaagtgatgttaaagtttatgagaatgtagctgttgaagtagatggaaatatatgtacagtgaaaatgaatagacctaaagcccttaatgcaataaattcaaagactttagaagaactttatgaagtatttgtagatattaataatgatgaaactattgatgttgtaatattgacaggggaaggaaaggcatttgtagctggagcagatattgcatacatgaaagatttagatgctgtagctgctaaagattttagtatcttaggagcaaaagcttttggagaaatagaaaatagtaaaaaagtagtgatagctgctgtaaacggatttgctttaggtggaggatgtgaacttgcaatggcatgtgatataagaattgcatctgctaaagctaaatttggtcagccagaagtaactcttggaataactccaggatatggaggaactcaaaggcttacaagattggttggaatggcaaaagcaaaagaattaatctttacaggtcaagttataaaagctgatgaagctgaaaaaatagggctagtaaatagagtcgttgagccagacattttaatagaagaagttgagaaattagctaagataatagctaaaaatgctcagcttgcagttagatactctaaagaagcaatacaacttggtgctcaaactgatataaatactggaatagatatagaatctaatttatttggtctttgtttttcaactaaagaccaaaaagaaggaatgtcagctttcgttgaaaagagagaagctaactttataaaagggtaataagaaggagatatacatatgagaagttttgaagaagtaattaagtttgcaaaagaaagaggacctaaaactatatcagtagcatgttgccaagataaagaagttttaatggcagttgaaatggctagaaaagaaaaaatagcaaatgccattttagtaggagatatagaaaagactaaagaaattgcaaaaagcatagacatggatatcgaaaattatgaactgatagatataaaagatttagcagaagcatctctaaaatctgttgaattagtttcacaaggaaaagccgacatggtaatgaaaggcttagtagacacatcaataatactaaaagcagttttaaataaagaagtaggtcttagaactggaaatgtattaagtcacgtagcagtatttgatgtagagggatatgatagattatttttcgtaactgacgcagctatgaacttagctcctgatacaaatactaaaaagcaaatcatagaaaatgcttgcacagtagcacattcattagatataagtgaaccaaaagttgctgcaatatgcgcaaaagaaaaagtaaatccaaaaatgaaagatacagttgaagctaaagaactagaagaaatgtatgaaagaggagaaatcaaaggttgtatggttggtgggccttttgcaattgataatgcagtatctttagaagcagctaaacataaaggtataaatcatcctgtagcaggacgagctgatatattattagccccagatattgaaggtggtaacatattatataaagctttggtattcttctcaaaatcaaaaaatgcaggagttatagttggggctaaagcaccaataatattaacttctagagcagacagtgaagaaactaaactaaactcaatagctttaggtgttttaatggcagcaaaggcataataagaaggagatatacatatgagcaaaatatttaaaatcttaacaataaatcctggttcgacatcaactaaaatagctgtatttgataatgaggatttagtatttgaaaaaactttaagacattcttcagaagaaataggaaaatatgagaaggtgtctgaccaatttgaatttcgtaaacaagtaatagaagaagctctaaaagaaggtggagtaaaaacatctgaattagatgctgtagtaggtagaggaggacttcttaaacctataaaaggtggtacttattcagtaagtgctgctatgattgaagatttaaaagtgggagttttaggagaacacgcttcaaacctaggtggaataatagcaaaacaaataggtgaagaagtaaatgttccttcatacatagtagaccctgttgttgtagatgaattagaagatgttgctagaatttctggtatgcctgaaataagtagagcaagtgtagtacatgctttaaatcaaaaggcaatagcaagaagatatgctagagaaataaacaagaaatatgaagatataaatcttatagttgcacacatgggtggaggagtttctgttggagctcataaaaatggtaaaatagtagatgttgcaaacgcattagatggagaaggacctttctctccagaaagaagtggtggactaccagtaggtgcattagtaaaaatgtgctttagtggaaaatatactcaagatgaaattaaaaagaaaataaaaggtaatggcggactagttgcatacttaaacactaatgatgctagagaagttgaagaaagaattgaagctggtgatgaaaaagctaaattagtatatgaagctatggcatatcaaatctctaaagaaataggagctagtgctgcagttcttaagggagatgtaaaagcaatattattaactggtggaatcgcatattcaaaaatgtttacagaaatgattgcagatagagttaaatttatagcagatgtaaaagtttatccaggtgaagatgaaatgattgcattagctcaaggtggacttagagttttaactggtgaagaagaggctcaagtttatgataactaataa

SEQ ID NO: 401 - DNA, 4947 bp, Artificial Sequence
  Description of Artificial Sequence: Synthetic polynucleotide
atgatcgtaaaacctatggtacgcaacaatatctgcctgaacgcccatcctcagggctgcaagaagggagtggaagatcagattgaatataccaagaaacgcattaccgcagaagtcaaagctggcgcaaaagctccaaaaaacgttctggtgcttggctgctcaaatggttacggcctggcgagccgcattactgctgcgttcggatacggggctgcgaccatcggcgtgtcctttgaaaaagcgggttcagaaaccaaatatggtacaccgggatggtacaataatttggcatttgatgaagcggcaaaacgcgagggtctttatagcgtgacgatcgacggcgatgcgttttcagacgagatcaaggcccaggtaattgaggaagccaaaaaaaaaggtatcaaatttgatctgatcgtatacagcttggccagcccagtacgtactgatcctgatacaggtatcatgcacaaaagcgttttgaaaccctttggaaaaacgttcacaggcaaaacagtagatccgtttactggcgagctgaaggaaatctccgcggaaccagcaaatgacgaggaagcagccgccactgttaaagttatggggggtgaagattgggaacgttggattaagcagctgtcgaaggaaggcctcttagaagaaggctgtattaccttggcctatagttatattggccctgaagctacccaagctttgtaccgtaaaggcacaatcggcaaggccaaagaacacctggaggccacagcacaccgtctcaacaaagagaacccgtcaatccgtgccttcgtgagcgtgaataaaggcctggtaacccgcgcaagcgccgtaatcccggtaatccctctgtatctcgccagcttgttcaaagtaatgaaagagaagggcaatcatgaaggttgtattgaacagatcacgcgtctgtacgccgagcgcctgtaccgtaaagatggtacaattccagttgatgaggaaaatcgcattcgcattgatgattgggagttagaagaagacgtccagaaagcggtatccgcgttgatggagaaagtcacgggtgaaaacgcagaatctctcactgacttagcggggtaccgccatgatttcttagctagtaacggctttgatgtagaaggtattaattatgaagcggaagttgaacgcttcgaccgtatctgataagaaggagatatacatatgagagaagtagtaattgccagtgcagctagaacagcagtaggaagttttggaggagcatttaaatcagtttcagcggtagagttaggggtaacagcagctaaagaagctataaaaagagctaacataactccagatatgatagatgaatctcttttagggggagtacttacagcaggtcttggacaaaatatagcaagacaaatagcattaggagcaggaataccagtagaaaaaccagctatgactataaatatagtttgtggttctggattaagatctgtttcaatggcatctcaacttatagcattaggtgatgctgatataatgttagttggtggagctgaaaacatgagtatgtctccttatttagtaccaagtgcgagatatggtgcaagaatgggtgatgctgcttttgttgattcaatgataaaagatggattatcagacatatttaataactatcacatgggtattactgctgaaaacatagcagagcaatggaatataactagagaagaacaagatgaattagctcttgcaagtcaaaataaagctgaaaaagctcaagctgaaggaaaatttgatgaagaaatagttcctgttgttataaaaggaagaaaaggtgacactgtagtagataaagatgaatatattaagcctggcactacaatggagaaacttgctaagttaagacctgcatttaaaaaagatggaacagttactgctggtaatgcatcaggaataaatgatggtgctgctatgttagtagtaatggctaaagaaaaagctgaagaactaggaatagagcctcttgcaactatagtttcttatggaacagctggtgttgaccctaaaataatgggatatggaccagttccagcaactaaaaaagctttagaagctgctaatatgactattgaagatatagatttagttgaagctaatgaggcatttgctgcccaatctgtagctgtaataagagacttaaatatagatatgaataaagttaatgttaatggtggagcaatagctataggacatccaataggatgctcaggagcaagaatacttactacacttttatatgaaatgaagagaagagatgctaaaactggtcttgctacactttgtataggcggtggaatgggaactactttaatagttaagagatagtaagaaggagatatacatatgaaattagctgtaataggtagtggaactatgggaagtggtattgtacaaacttttgcaagttgtggacatgatgtatgtttaaagagtagaactcaaggtgctatagataaatgtttagctttattagataaaaatttaactaagttagttactaagggaaaaatggatgaagctacaaaagcagaaatattaagtcatgttagttcaactactaattatgaagatttaaaagatatggatttaataatagaagcatctgtagaagacatgaatataaagaaagatgttttcaagttactagatgaattatgtaaagaagatactatcttggcaacaaatacttcatcattatctataacagaaatagcttcttctactaagcgcccagataaagttataggaatgcatttctttaatccagttcctatgatgaaattagttgaagttataagtggtcagttaacatcaaaagttacttttgatacagtatttgaattatctaagagtatcaataaagtaccagtagatgtatctgaatctcctggatttgtagtaaatagaatacttatacctatgataaatgaagctgttggtatatatgcagatggtgttgcaagtaaagaagaaatagatgaagctatgaaattaggagcaaaccatccaatgggaccactagcattaggtgatttaatcggattagatgttgttttagctataatgaacgttttatatactgaatttggagatactaaatatagacctcatccacttttagctaaaatggttagagctaatcaattaggaagaaaaactaagataggattctatgattataataaataataagaaggagatatacatatgagtacaagtgatgttaaagtttatgagaatgtagctgttgaagtagatggaaatatatgtacagtgaaaatgaatagacctaaagcccttaatgcaataaattcaaagactttagaagaactttatgaagtatttgtagatattaataatgatgaaactattgatgttgtaatattgacaggggaaggaaaggcatttgtagctggagcagatattgcatacatgaaagatttagatgctgtagctgctaaagattttagtatcttaggagcaaaagcttttggagaaatagaaaatagtaaaaaagtagtgatagctgctgtaaacggatttgctttaggtggaggatgtgaacttgcaatggcatgtgatataagaattgcatctgctaaagctaaatttggtcagccagaagtaactcttggaataactccaggatatggaggaactcaaaggcttacaagattggttggaatggcaaaagcaaaagaattaatctttacaggtcaagttataaaagctgatgaagctgaaaaaatagggctagtaaatagagtcgttgagccagacattttaatagaagaagttgagaaattagctaagataatagctaaaaatgctcagcttgcagttagatactctaaagaagcaatacaacttggtgctcaaactgatataaatactggaatagatatagaatctaatttatttggtctttgtttttcaactaaagaccaaaaagaaggaatgtcagctttcgttgaaaagagagaagctaactttataaaagggtaataagaaggagatatacatatgagtcaggcgctaaaaaatttactgacattgttaaatctggaaaaaattgaggaaggactctttcgcggccagagtgaagatttaggtttacgccaggtgtttggcggccaggtcgtgggtcaggccttgtatgctgcaaaagagaccgtccctgaagagcggctggtacattcgtttcacagctactttcttcgccctggcgatagtaagaagccgattatttatgatgtcgaaacgctgcgtgacggtaacagcttcagcgcccgccgggttgctgctattcaaaacggcaaaccgattttttatatgactgcctctttccaggcaccagaagcgggtttcgaacatcaaaaaacaatgccgtccgcgccagcgcctgatggcctcccttcggaaacgcaaatcgcccaatcgctggcgcacctgctgccgccagtgctgaaagataaattcatctgcgatcgtccgctggaagtccgtccggtggagtttcataacccactgaaaggtcacgtcgcagaaccacatcgtcaggtgtggatccgcgcaaatggtagcgtgccggatgacctgcgcgttcatcagtatctgctcggttacgcttctgatcttaacttcctgccggtagctctacagccgcacggcatcggttttctcgaaccggggattcagattgccaccattgaccattccatgtggttccatcgcccgtttaatttgaatgaatggctgctgtatagcgtggagagcacctcggcgtccagcgcacgtggctttgtgcgcggtgagttttatacccaagacggcgtactggttgcctcgaccgttcaggaaggggtgatgcgtaatcacaattaa

SEQ ID NO: 402 - DNA, 8575 bp, Artificial Sequence
  Description of Artificial Sequence: Synthetic polynucleotide
ttattatcgcaccgcaatcgggattttcgattcataaagcaggtcgtaggtcggcttgttgagcaggtcttgcagcgtgaaaccgtccagatacgtgaaaaacgacttcattgcaccgccgagtatgcccgtcagccggcaggacggcgtaatcaggcattcgttgttcgggcccatacactcgaccagctgcatcggttcgaggtggcggacgaccgcgccgatattgatgcgttcgggcggcgcggccagcctcagcccgccgcctttcccgcgtacgctgtgcaagaacccgcctttgaccagcgcggtaaccactttcatcaaatggcttttggaaatgccgtaggtcgaggcgatggtggcgatattgaccagcgcgtcgtcgttgacggcggtgtagatgaggacgcgcagcccgtagtcggtatgttgggtcagatacatacaacctccttagtacatgcaaaattatttctagagcaacatacgagccggaagcataaagtgtaaagcctggggtgcctaatgagttgagttgaggaattataacaggaagaaatattcctcatacgcttgtaattcctctatggttgttgacaattaatcatcggctcgtataatgtataacattcatattttgtgaattttaaactctagaaataattttgtttaactttaagaaggagatatacatatggatttaaattctaaaaaatatcagatgcttaaagagctatatgtaagcttcgctgaaaatgaagttaaacctttagcaacagaacttgatgaagaagaaagatttccttatgaaacagtggaaaaaatggcaaaagcaggaatgatgggtataccatatccaaaagaatatggtggagaaggtggagacactgtaggatatataatggcagttgaagaattgtctagagtttgtggtactacaggagttatattatcagctcatacatctcttggctcatggcctatatatcaatatggtaatgaagaacaaaaacaaaaattcttaagaccactagcaagtggagaaaaattaggagcatttggtcttactgagcctaatgctggtacagatgcgtctggccaacaaacaactgctgttttagacggggatgaatacatacttaatggctcaaaaatatttataacaaacgcaatagctggtgacatatatgtagtaatggcaatgactgataaatctaaggggaacaaaggaatatcagcatttatagttgaaaaaggaactcctgggtttagctttggagttaaagaaaagaaaatgggtataagaggttcagctacgagtgaattaatatttgaggattgcagaatacctaaagaaaatttacttggaaaagaaggtcaaggatttaagatagcaatgtctactcttgatggtggtagaattggtatagctgcacaagctttaggtttagcacaaggtgctcttgatgaaactgttaaatatgtaaaagaaagagtacaatttggtagaccattatcaaaattccaaaatacacaattccaattagctgatatggaagttaaggtacaagcggctagacaccttgtatatcaagcagctataaataaagacttaggaaaaccttatggagtagaagcagcaatggcaaaattatttgcagctgaaacagctatggaagttactacaaaagctgtacaacttcatggaggatatggatacactcgtgactatccagtagaaagaatgatgagagatgctaagataactgaaatatatgaaggaactagtgaagttcaaagaatggttatttcaggaaaactattaaaatagtaagaaggagatatacatatggaggaaggatttatgaatatagtcgtttgtataaaacaagttccagatacaacagaagttaaactagatcctaatacaggtactttaattagagatggagtaccaagtataataaaccctgatgataaagcaggtttagaagaagctataaaattaaaagaagaaatgggtgctcatgtaactgttataacaatgggacctcctcaagcagatatggctttaaaagaagctttagcaatgggtgcagatagaggtatattattaacagatagagcatttgcgggtgctgatacttgggcaacttcatcagcattagcaggagcattaaaaaatatagattttgatattataatagctggaagacaggcgatagatggagatactgcacaagttggacctcaaatagctgaacatttaaatcttccatcaataacatatgctgaagaaataaaaactgaaggtgaatatgtattagtaaaaagacaatttgaagattgttgccatgacttaaaagttaaaatgccatgccttataacaactcttaaagatatgaacacaccaagatacatgaaagttggaagaatatatgatgctttcgaaaatgatgtagtagaaacatggactgtaaaagatatagaagttgacccttctaatttaggtcttaaaggttctccaactagtgtatttaaatcatttacaaaatcagttaaaccagctggtacaatatacaatgaagatgcgaaaacatcagctggaattatcatagataaattaaaagagaagtatatcatataataagaaggagatatacatatgggtaacgttttagtagtaatagaacaaagagaaaatgtaattcaaactgtttctttagaattactaggaaaggctacagaaatagcaaaagattatgatacaaaagtttctgcattacttttaggtagtaaggtagaaggtttaatagatacattagcacactatggtgcagatgaggtaatagtagtagatgatgaagctttagcagtgtatacaactgaaccatatacaaaagcagcttatgaagcaataaaagcagctgaccctatagttgtattatttggtgcaacttcaataggtagagatttagcgcctagagtttctgctagaatacatacaggtcttactgctgactgtacaggtcttgcagtagctgaagatacaaaattattattaatgacaagacctgcctttggtggaaatataatggcaacaatagtttgtaaagatttcagacctcaaatgtctacagttagaccaggggttatgaagaaaaatgaacctgatgaaactaaagaagctgtaattaaccgtttcaaggtagaatttaatgatgctgataaattagttcaagttgtacaagtaataaaagaagctaaaaaacaagttaaaatagaagatgctaagatattagtttctgctggacgtggaatgggtggaaaagaaaacttagacatactttatgaattagctgaaattataggtggagaagtttctggttctcgtgccactatagatgcaggttggttagataaagcaagacaagttggtcaaactggtaaaactgtaagaccagacctttatatagcatgtggtatatctggagcaatacaacatatagctggtatggaagatgctgagtttatagttgctataaataaaaatccagaagctccaatatttaaatatgctgatgttggtatagttggagatgttcataaagtgcttccagaacttatcagtcagttaagtgttgcaaaagaaaaaggtgaagttttagctaactaataagaaggagatatacatatgagagaagtagtaattgccagtgcagctagaacagcagtaggaagttttggaggagcatttaaatcagtttcagcggtagagttaggggtaacagcagctaaagaagctataaaaagagctaacataactccagatatgatagatgaatctcttttagggggagtacttacagcaggtcttggacaaaatatagcaagacaaatagcattaggagcaggaataccagtagaaaaaccagctatgactataaatatagtttgtggttctggattaagatctgtttcaatggcatctcaacttatagcattaggtgatgctgatataatgttagttggtggagctgaaaacatgagtatgtctccttatttagtaccaagtgcgagatatggtgcaagaatgggtgatgctgcttttgttgattcaatgataaaagatggattatcagacatatttaataactatcacatgggtattactgctgaaaacatagcagagcaatggaatataactagagaagaacaagatgaattagctcttgcaagtcaaaataaagctgaaaaagctcaagctgaaggaaaatttgatgaagaaatagttcctgttgttataaaaggaagaaaaggtgacactgtagtagataaagatgaatatattaagcctggcactacaatggagaaacttgctaagttaagacctgcatttaaaaaagatggaacagttactgctggtaatgcatcaggaataaatgatggtgctgctatgttagtagtaatggctaaagaaaaagctgaagaactaggaatagagcctcttgcaactatagtttcttatggaacagctggtgttgaccctaaaataatgggatatggaccagttccagcaactaaaaaagctttagaagctgctaatatgactattgaagatatagatttagttgaagctaatgaggcatttgctgcccaatctgtagctgtaataagagacttaaatatagatatgaataaagttaatgttaatggtggagcaatagctataggacatccaataggatgctcaggagcaagaatacttactacacttttatatgaaatgaagagaagagatgctaaaactggtcttgctacactttgtataggcggtggaatgggaactactttaatagttaagagatagtaagaaggagatatacatatgaaattagctgtaataggtagtggaactatgggaagtggtattgtacaaacttttgcaagttgtggacatgatgtatgtttaaagagtagaactcaaggtgctatagataaatgtttagctttattagataaaaatttaactaagttagttactaagggaaaaatggatgaagctacaaaagcagaaatattaagtcatgttagttcaactactaattatgaagatttaaaagatatggatttaataatagaagcatctgtagaagacatgaatataaagaaagatgttttcaagttactagatgaattatgtaaagaagatactatcttggcaacaaatacttcatcattatctataacagaaatagcttcttctactaagcgcccagataaagttataggaatgcatttctttaatccagttcctatgatgaaattagttgaagttataagtggtcagttaacatcaaaagttacttttgatacagtatttgaattatctaagagtatcaataaagtaccagtagatgtatctgaatctcctggatttgtagtaaatagaatacttatacctatgataaatgaagctgttggtatatatgcagatggtgttgcaagtaaagaagaaatagatgaagctatgaaattaggagcaaaccatccaatgggaccactagcattaggtgatttaatcggattagatgttgttttagctataatgaacgttttatatactgaatttggagatactaaatatagacctcatccacttttagctaaaatggttagagctaatcaattaggaagaaaaactaagataggattctatgattataataaataataagaaggagatatacatatgagtacaagtgatgttaaagtttatgagaatgtagctgttgaagtagatggaaatatatgtacagtgaaaatgaatagacctaaagcccttaatgcaataaattcaaagactttagaagaactttatgaagtatttgtagatattaataatgatgaaactattgatgttgtaatattgacaggggaaggaaaggcatttgtagctggagcagatattgcatacatgaaagatttagatgctgtagctgctaaagattttagtatcttaggagcaaaagcttttggagaaatagaaaatagtaaaaaagtagtgatagctgctgtaaacggatttgctttaggtggaggatgtgaacttgcaatggcatgtgatataagaattgcatctgctaaagctaaatttggtcagccagaagtaactcttggaataactccaggatatggaggaactcaaaggcttacaagattggttggaatggcaaaagcaaaagaattaatctttacaggtcaagttataaaagctgatgaagctgaaaaaatagggctagtaaatagagtcgttgagccagacattttaatagaagaagttgagaaattagctaagataatagctaaaaatgctcagcttgcagttagatactctaaagaagcaatacaacttggtgctcaaactgatataaatactggaatagatatagaatctaatttatttggtctttgtttttcaactaaagaccaaaaagaaggaatgtcagctttcgttgaaaagagagaagctaactttataaaagggtaataagaaggagatatacatatgagaagttttgaagaagtaattaagtttgcaaaagaaagaggacctaaaactatatcagtagcatgttgccaagataaagaagttttaatggcagttgaaatggctagaaaagaaaaaatagcaaatgccattttagtaggagatatagaaaagactaaagaaattgcaaaaagcatagacatggatatcgaaaattatgaactgatagatataaaagatttagcagaagcatctctaaaatctgttgaattagtttcacaaggaaaagccgacatggtaatgaaaggcttagtagacacatcaataatactaaaagcagttttaaataaagaagtaggtcttagaactggaaatgtattaagtcacgtagcagtatttgatgtagagggatatgatagattatttttcgtaactgacgcagctatgaacttagctcctgatacaaatactaaaaagcaaatcatagaaaatgcttgcacagtagcacattcattagatataagtgaaccaaaagttgctgcaatatgcgcaaaagaaaaagtaaatccaaaaatgaaagatacagttgaagctaaagaactagaagaaatgtatgaaagaggagaaatcaaaggttgtatggttggtgggccttttgcaattgataatgcagtatctttagaagcagctaaacataaaggtataaatcatcctgtagcaggacgagctgatatattattagccccagatattgaaggtggtaacatattatataaagctttggtattcttctcaaaatcaaaaaatgcaggagttatagttggggctaaagcaccaataatattaacttctagagcagacagtgaagaaactaaactaaactcaatagctttaggtgttttaatggcagcaaaggcataataagaaggagatatacatatgagcaaaatatttaaaatcttaacaataaatcctggttcgacatcaactaaaatagctgtatttgataatgaggatttagtatttgaaaaaactttaagacattcttcagaagaaataggaaaatatgagaaggtgtctgaccaatttgaatttcgtaaacaagtaatagaagaagctctaaaagaaggtggagtaaaaacatctgaattagatgctgtagtaggtagaggaggacttcttaaacctataaaaggtggtacttattcagtaagtgctgctatgattgaagatttaaaagtgggagttttaggagaacacgcttcaaacctaggtggaataatagcaaaacaaataggtgaagaagtaaatgttccttcatacatagtagaccctgttgttgtagatgaattagaagatgttgctagaatttctggtatgcctgaaataagtagagcaagtgtagtacatgctttaaatcaaaaggcaatagcaagaagatatgctagagaaataaacaagaaatatgaagatataaatcttatagttgcacacatgggtggaggagtttctgttggagctcataaaaatggtaaaatagtagatgttgcaaacgcattagatggagaaggacctttctctccagaaagaagtggtggactaccagtaggtgcattagtaaaaatgtgctttagtggaaaatatactcaagatgaaattaaaaagaaaataaaaggtaatggcggactagttgcatacttaaacactaatgatgctagagaagttgaagaaagaattgaagctggtgatgaaaaagctaaattagtatatgaagctatggcatatcaaatctctaaagaaataggagctagtgctgcagttcttaagggagatgtaaaagcaatattattaactggtggaatcgcatattcaaaaatgtttacagaaatgattgcagatagagttaaatttatagcagatgtaaaagtttatccaggtgaagatgaaatgattgcattagctcaaggtggacttagagttttaactggtgaagaagaggctcaagtttatgataactaataa

SEQ ID NO: 403 - DNA, 6787 bp, Artificial Sequence
  Description of Artificial Sequence: Synthetic polynucleotide
ttattatcgcaccgcaatcgggattttcgattcataaagcaggtcgtaggtcggcttgttgagcaggtcttgcagcgtgaaaccgtccagatacgtgaaaaacgacttcattgcaccgccgagtatgcccgtcagccggcaggacggcgtaatcaggcattcgttgttcgggcccatacactcgaccagctgcatcggttcgaggtggcggacgaccgcgccgatattgatgcgttcgggcggcgcggccagcctcagcccgccgcctttcccgcgtacgctgtgcaagaacccgcctttgaccagcgcggtaaccactttcatcaaatggcttttggaaatgccgtaggtcgaggcgatggtggcgatattgaccagcgcgtcgtcgttgacggcggtgtagatgaggacgcgcagcccgtagtcggtatgttgggtcagatacatacaacctccttagtacatgcaaaattatttctagagcaacatacgagccggaagcataaagtgtaaagcctggggtgcctaatgagttgagttgaggaattataacaggaagaaatattcctcatacgcttgtaattcctctatggttgttgacaattaatcatcggctcgtataatgtataacattcatattttgtgaattttaaactctagaaataattttgtttaactttaagaaggagatatacatatgatcgtaaaacctatggtacgcaacaatatctgcctgaacgcccatcctcagggctgcaagaagggagtggaagatcagattgaatataccaagaaacgcattaccgcagaagtcaaagctggcgcaaaagctccaaaaaacgttctggtgcttggctgctcaaatggttacggcctggcgagccgcattactgctgcgttcggatacggggctgcgaccatcggcgtgtcctttgaaaaagcgggttcagaaaccaaatatggtacaccgggatggtacaataatttggcatttgatgaagcggcaaaacgcgagggtctttatagcgtgacgatcgacggcgatgcgttttcagacgagatcaaggcccaggtaattgaggaagccaaaaaaaaaggtatcaaatttgatctgatcgtatacagcttggccagcccagtacgtactgatcctgatacaggtatcatgcacaaaagcgttttgaaaccctttggaaaaacgttcacaggcaaaacagtagatccgtttactggcgagctgaaggaaatctccgcggaaccagcaaatgacgaggaagcagccgccactgttaaagttatggggggtgaagattgggaacgttggattaagcagctgtcgaaggaaggcctcttagaagaaggctgtattaccttggcctatagttatattggccctgaagctacccaagctttgtaccgtaaaggcacaatcggcaaggccaaagaacacctggaggccacagcacaccgtctcaacaaagagaacccgtcaatccgtgccttcgtgagcgtgaataaaggcctggtaacccgcgcaagcgccgtaatcccggtaatccctctgtatctcgccagcttgttcaaagtaatgaaagagaagggcaatcatgaaggttgtattgaacagatcacgcgtctgtacgccgagcgcctgtaccgtaaagatggtacaattccagttgatgaggaaaatcgcattcgcattgatgattgggagttagaagaagacgtccagaaagcggtatccgcgttgatggagaaagtcacgggtgaaaacgcagaatctctcactgacttagcggggtaccgccatgatttcttagctagtaacggctttgatgtagaaggtattaattatgaagcggaagttgaacgcttcgaccgtatctgataagaaggagatatacatatgagagaagtagtaattgccagtgcagctagaacagcagtaggaagttttggaggagcatttaaatcagtttcagcggtagagttaggggtaacagcagctaaagaagctataaaaagagctaacataactccagatatgatagatgaatctcttttagggggagtacttacagcaggtcttggacaaaatatagcaagacaaatagcattaggagcaggaataccagtagaaaaaccagctatgactataaatatagtttgtggttctggattaagatctgtttcaatggcatctcaacttatagcattaggtgatgctgatataatgttagttggtggagctgaaaacatgagtatgtctccttatttagtaccaagtgcgagatatggtgcaagaatgggtgatgctgcttttgttgattcaatgataaaagatggattatcagacatatttaataactatcacatgggtattactgctgaaaacatagcagagcaatggaatataactagagaagaacaagatgaattagctcttgcaagtcaaaataaagctgaaaaagctcaagctgaaggaaaatttgatgaagaaatagttcctgttgttataaaaggaagaaaaggtgacactgtagtagataaagatgaatatattaagcctggcactacaatggagaaacttgctaagttaagacctgcatttaaaaaagatggaacagttactgctggtaatgcatcaggaataaatgatggtgctgctatgttagtagtaatggctaaagaaaaagctgaagaactaggaatagagcctcttgcaactatagtttcttatggaacagctggtgttgaccctaaaataatgggatatggaccagttccagcaactaaaaaagctttagaagctgctaatatgactattgaagatatagatttagttgaagctaatgaggcatttgctgcccaatctgtagctgtaataagagacttaaatatagatatgaataaagttaatgttaatggtggagcaatagctataggacatccaataggatgctcaggagcaagaatacttactacacttttatatgaaatgaagagaagagatgctaaaactggtcttgctacactttgtataggcggtggaatgggaactactttaatagttaagagatagtaagaaggagatatacatatgaaattagctgtaataggtagtggaactatgggaagtggtattgtacaaacttttgcaagttgtggacatgatgtatgtttaaagagtagaactcaaggtgctatagataaatgtttagctttattagataaaaatttaactaagttagttactaagggaaaaatggatgaagctacaaaagcagaaatattaagtcatgttagttcaactactaattatgaagatttaaaagatatggatttaataatagaagcatctgtagaagacatgaatataaagaaagatgttttcaagttactagatgaattatgtaaagaagatactatcttggcaacaaatacttcatcattatctataacagaaatagcttcttctactaagcgcccagataaagttataggaatgcatttctttaatccagttcctatgatgaaattagttgaagttataagtggtcagttaacatcaaaagttacttttgatacagtatttgaattatctaagagtatcaataaagtaccagtagatgtatctgaatctcctggatttgtagtaaatagaatacttatacctatgataaatgaagctgttggtatatatgcagatggtgttgcaagtaaagaagaaatagatgaagctatgaaattaggagcaaaccatccaatgggaccactagcattaggtgatttaatcggattagatgttgttttagctataatgaacgttttatatactgaatttggagatactaaatatagacctcatccacttttagctaaaatggttagagctaatcaattaggaagaaaaactaagataggattctatgattataataaataataagaaggagatatacatatgagtacaagtgatgttaaagtttatgagaatgtagctgttgaagtagatggaaatatatgtacagtgaaaatgaatagacctaaagcccttaatgcaataaattcaaagactttagaagaactttatgaagtatttgtagatattaataatgatgaaactattgatgttgtaatattgacaggggaaggaaaggcatttgtagctggagcagatattgcatacatgaaagatttagatgctgtagctgctaaagattttagtatcttaggagcaaaagcttttggagaaatagaaaatagtaaaaaagtagtgatagctgctgtaaacggatttgctttaggtggaggatgtgaacttgcaatggcatgtgatataagaattgcatctgctaaagctaaatttggtcagccagaagtaactcttggaataactccaggatatggaggaactcaaaggcttacaagattggttggaatggcaaaagcaaaagaattaatctttacaggtcaagttataaaagctgatgaagctgaaaaaatagggctagtaaatagagtcgttgagccagacattttaatagaagaagttgagaaattagctaagataatagctaaaaatgctcagcttgcagttagatactctaaagaagcaatacaacttggtgctcaaactgatataaatactggaatagatatagaatctaatttatttggtctttgtttttcaactaaagaccaaaaagaaggaatgtcagctttcgttgaaaagagagaagctaactttataaaagggtaataagaaggagatatacatatgagaagttttgaagaagtaattaagtttgcaaaagaaagaggacctaaaactatatcagtagcatgttgccaagataaagaagttttaatggcagttgaaatggctagaaaagaaaaaatagcaaatgccattttagtaggagatatagaaaagactaaagaaattgcaaaaagcatagacatggatatcgaaaattatgaactgatagatataaaagatttagcagaagcatctctaaaatctgttgaattagtttcacaaggaaaagccgacatggtaatgaaaggcttagtagacacatcaataatactaaaagcagttttaaataaagaagtaggtcttagaactggaaatgtattaagtcacgtagcagtatttgatgtagagggatatgatagattatttttcgtaactgacgcagctatgaacttagctcctgatacaaatactaaaaagcaaatcatagaaaatgcttgcacagtagcacattcattagatataagtgaaccaaaagttgctgcaatatgcgcaaaagaaaaagtaaatccaaaaatgaaagatacagttgaagctaaagaactagaagaaatgtatgaaagaggagaaatcaaaggttgtatggttggtgggccttttgcaattgataatgcagtatctttagaagcagctaaacataaaggtataaatcatcctgtagcaggacgagctgatatattattagccccagatattgaaggtggtaacatattatataaagctttggtattcttctcaaaatcaaaaaatgcaggagttatagttggggctaaagcaccaataatattaacttctagagcagacagtgaagaaactaaactaaactcaatagctttaggtgttttaatggcagcaaaggcataataagaaggagatatacatatgagcaaaatatttaaaatcttaacaataaatcctggttcgacatcaactaaaatagctgtatttgataatgaggatttagtatttgaaaaaactttaagacattcttcagaagaaataggaaaatatgagaaggtgtctgaccaatttgaatttcgtaaacaagtaatagaagaagctctaaaagaaggtggagtaaaaacatctgaattagatgctgtagtaggtagaggaggacttcttaaacctataaaaggtggtacttattcagtaagtgctgctatgattgaagatttaaaagtgggagttttaggagaacacgcttcaaacctaggtggaataatagcaaaacaaataggtgaagaagtaaatgttccttcatacatagtagaccctgttgttgtagatgaattagaagatgttgctagaatttctggtatgcctgaaataagtagagcaagtgtagtacatgctttaaatcaaaaggcaatagcaagaagatatgctagagaaataaacaagaaatatgaagatataaatcttatagttgcacacatgggtggaggagtttctgttggagctcataaaaatggtaaaatagtagatgttgcaaacgcattagatggagaaggacctttctctccagaaagaagtggtggactaccagtaggtgcattagtaaaaatgtgctttagtggaaaatatactcaagatgaaattaaaaagaaaataaaaggtaatggcggactagttgcatacttaaacactaatgatgctagagaagttgaagaaagaattgaagctggtgatgaaaaagctaaattagtatatgaagctatggcatatcaaatctctaaagaaataggagctagtgctgcagttcttaagggagatgtaaaagcaatattattaactggtggaatcgcatattcaaaaatgtttacagaaatgattgcagatagagttaaatttatagcagatgtaaaagtttatccaggtgaagatgaaatgattgcattagctcaaggtggacttagagttttaactggtgaagaagaggctcaagtttatgataactaataa

SEQ ID NO: 404 - DNA, 5644 bp, Artificial Sequence
  Description of Artificial Sequence: Synthetic polynucleotide
ttattatcgcaccgcaatcgggattttcgattcataaagcaggtcgtaggtcggcttgttgagcaggtcttgcagcgtgaaaccgtccagatacgtgaaaaacgacttcattgcaccgccgagtatgcccgtcagccggcaggacggcgtaatcaggcattcgttgttcgggcccatacactcgaccagctgcatcggttcgaggtggcggacgaccgcgccgatattgatgcgttcgggcggcgcggccagcctcagcccgccgcctttcccgcgtacgctgtgcaagaacccgcctttgaccagcgcggtaaccactttcatcaaatggcttttggaaatgccgtaggtcgaggcgatggtggcgatattgaccagcgcgtcgtcgttgacggcggtgtagatgaggacgcgcagcccgtagtcggtatgttgggtcagatacatacaacctccttagtacatgcaaaattatttctagagcaacatacgagccggaagcataaagtgtaaagcctggggtgcctaatgagttgagttgaggaattataacaggaagaaatattcctcatacgcttgtaattcctctatggttgttgacaattaatcatcggctcgtataatgtataacattcatattttgtgaattttaaactctagaaataattttgtttaactttaagaaggagatatacatatgatcgtaaaacctatggtacgcaacaatatctgcctgaacgcccatcctcagggctgcaagaagggagtggaagatcagattgaatataccaagaaacgcattaccgcagaagtcaaagctggcgcaaaagctccaaaaaacgttctggtgcttggctgctcaaatggttacggcctggcgagccgcattactgctgcgttcggatacggggctgcgaccatcggcgtgtcctttgaaaaagcgggttcagaaaccaaatatggtacaccgggatggtacaataatttggcatttgatgaagcggcaaaacgcgagggtctttatagcgtgacgatcgacggcgatgcgttttcagacgagatcaaggcccaggtaattgaggaagccaaaaaaaaaggtatcaaatttgatctgatcgtatacagcttggccagcccagtacgtactgatcctgatacaggtatcatgcacaaaagcgttttgaaaccctttggaaaaacgttcacaggcaaaacagtagatccgtttactggcgagctgaaggaaatctccgcggaaccagcaaatgacgaggaagcagccgccactgttaaagttatggggggtgaagattgggaacgttggattaagcagctgtcgaaggaaggcctcttagaagaaggctgtattaccttggcctatagttatattggccctgaagctacccaagctttgtaccgtaaaggcacaatcggcaaggccaaagaacacctggaggccacagcacaccgtctcaacaaagagaacccgtcaatccgtgccttcgtgagcgtgaataaaggcctggtaacccgcgcaagcgccgtaatcccggtaatccctctgtatctcgccagcttgttcaaagtaatgaaagagaagggcaatcatgaaggttgtattgaacagatcacgcgtctgtacgccgagcgcctgtaccgtaaagatggtacaattccagttgatgaggaaaatcgcattcgcattgatgattgggagttagaagaagacgtccagaaagcggtatccgcgttgatggagaaagtcacgggtgaaaacgcagaatctctcactgacttagcggggtaccgccatgatttcttagctagtaacggctttgatgtagaaggtattaattatgaagcggaagttgaacgcttcgaccgtatctgataagaaggagatatacatatgagagaagtagtaattgccagtgcagctagaacagcagtaggaagttttggaggagcatttaaatcagtttcagcggtagagttaggggtaacagcagctaaagaagctataaaaagagctaacataactccagatatgatagatgaatctcttttagggggagtacttacagcaggtcttggacaaaatatagcaagacaaatagcattaggagcaggaataccagtagaaaaaccagctatgactataaatatagtttgtggttctggattaagatctgtttcaatggcatctcaacttatagcattaggtgatgctgatataatgttagttggtggagctgaaaacatgagtatgtctccttatttagtaccaagtgcgagatatggtgcaagaatgggtgatgctgcttttgttgattcaatgataaaagatggattatcagacatatttaataactatcacatgggtattactgctgaaaacatagcagagcaatggaatataactagagaagaacaagatgaattagctcttgcaagtcaaaataaagctgaaaaagctcaagctgaaggaaaatttgatgaagaaatagttcctgttgttataaaaggaagaaaaggtgacactgtagtagataaagatgaatatattaagcctggcactacaatggagaaacttgctaagttaagacctgcatttaaaaaagatggaacagttactgctggtaatgcatcaggaataaatgatggtgctgctatgttagtagtaatggctaaagaaaaagctgaagaactaggaatagagcctcttgcaactatagtttcttatggaacagctggtgttgaccctaaaataatgggatatggaccagttccagcaactaaaaaagctttagaagctgctaatatgactattgaagatatagatttagttgaagctaatgaggcatttgctgcccaatctgtagctgtaataagagacttaaatatagatatgaataaagttaatgttaatggtggagcaatagctataggacatccaataggatgctcaggagcaagaatacttactacacttttatatgaaatgaagagaagagatgctaaaactggtcttgctacactttgtataggcggtggaatgggaactactttaatagttaagagatagtaagaaggagatatacatatgaaattagctgtaataggtagtggaactatgggaagtggtattgtacaaacttttgcaagttgtggacatgatgtatgtttaaagagtagaactcaaggtgctatagataaatgtttagctttattagataaaaatttaactaagttagttactaagggaaaaatggatgaagctacaaaagcagaaatattaagtcatgttagttcaactactaattatgaagatttaaaagatatggatttaataatagaagcatctgtagaagacatgaatataaagaaagatgttttcaagttactagatgaattatgtaaagaagatactatcttggcaacaaatacttcatcattatctataacagaaatagcttcttctactaagcgcccagataaagttataggaatgcatttctttaatccagttcctatgatgaaattagttgaagttataagtggtcagttaacatcaaaagttacttttgatacagtatttgaattatctaagagtatcaataaagtaccagtagatgtatctgaatctcctggatttgtagtaaatagaatacttatacctatgataaatgaagctgttggtatatatgcagatggtgttgcaagtaaagaagaaatagatgaagctatgaaattaggagcaaaccatccaatgggaccactagcattaggtgatttaatcggattagatgttgttttagctataatgaacgttttatatactgaatttggagatactaaatatagacctcatccacttttagctaaaatggttagagctaatcaattaggaagaaaaactaagataggattctatgattataataaataataagaaggagatatacatatgagtacaagtgatgttaaagtttatgagaatgtagctgttgaagtagatggaaatatatgtacagtgaaaatgaatagacctaaagcccttaatgcaataaattcaaagactttagaagaactttatgaagtatttgtagatattaataatgatgaaactattgatgttgtaatattgacaggggaaggaaaggcatttgtagctggagcagatattgcatacatgaaagatttagatgctgtagctgctaaagattttagtatcttaggagcaaaagcttttggagaaatagaaaatagtaaaaaagtagtgatagctgctgtaaacggatttgctttaggtggaggatgtgaacttgcaatggcatgtgatataagaattgcatctgctaaagctaaatttggtcagccagaagtaactcttggaataactccaggatatggaggaactcaaaggcttacaagattggttggaatggcaaaagcaaaagaattaatctttacaggtcaagttataaaagctgatgaagctgaaaaaatagggctagtaaatagagtcgttgagccagacattttaatagaagaagttgagaaattagctaagataatagctaaaaatgctcagcttgcagttagatactctaaagaagcaatacaacttggtgctcaaactgatataaatactggaatagatatagaatctaatttatttggtctttgtttttcaactaaagaccaaaaagaaggaatgtcagctttcgttgaaaagagagaagctaactttataaaagggtaataagaaggagatatacatatgagtcaggcgctaaaaaatttactgacattgttaaatctggaaaaaattgaggaaggactctttcgcggccagagtgaagatttaggtttacgccaggtgtttggcggccaggtcgtgggtcaggccttgtatgctgcaaaagagaccgtccctgaagagcggctggtacattcgtttcacagctactttcttcgccctggcgatagtaagaagccgattatttatgatgtcgaaacgctgcgtgacggtaacagcttcagcgcccgccgggttgctgctattcaaaacggcaaaccgattttttatatgactgcctctttccaggcaccagaagcgggtttcgaacatcaaaaaacaatgccgtccgcgccagcgcctgatggcctcccttcggaaacgcaaatcgcccaatcgctggcgcacctgctgccgccagtgctgaaagataaattcatctgcgatcgtccgctggaagtccgtccggtggagtttcataacccactgaaaggtcacgtcgcagaaccacatcgtcaggtgtggatccgcgcaaatggtagcgtgccggatgacctgcgcgttcatcagtatctgctcggttacgcttctgatcttaacttcctgccggtagctctacagccgcacggcatcggttttctcgaaccggggattcagattgccaccattgaccattccatgtggttccatcgcccgtttaatttgaatgaatggctgctgtatagcgtggagagcacctcggcgtccagcgcacgtggctttgtgcgcggtgagttttatacccaagacggcgtactggttgcctcgaccgttcaggaaggggtgatgcgtaatcacaattaa

SEQ ID NO: 405 - DNA, 8012 bp, Artificial Sequence
  Description of Artificial Sequence: Synthetic polynucleotide
ctcgagttcattatccatcctccatcgccacgatagttcatggcgataggtagaatagcaatgaacgattatccctatcaagcattctgactgataattgctcacacgaattcattaaagaggagaaaggtaccatggatttaaattctaaaaaatatcagatgcttaaagagctatatgtaagcttcgctgaaaatgaagttaaacctttagcaacagaacttgatgaagaagaaagatttccttatgaaacagtggaaaaaatggcaaaagcaggaatgatgggtataccatatccaaaagaatatggtggagaaggtggagacactgtaggatatataatggcagttgaagaattgtctagagtttgtggtactacaggagttatattatcagctcatacatctcttggctcatggcctatatatcaatatggtaatgaagaacaaaaacaaaaattcttaagaccactagcaagtggagaaaaattaggagcatttggtcttactgagcctaatgctggtacagatgcgtctggccaacaaacaactgctgttttagacggggatgaatacatacttaatggctcaaaaatatttataacaaacgcaatagctggtgacatatatgtagtaatggcaatgactgataaatctaaggggaacaaaggaatatcagcatttatagttgaaaaaggaactcctgggtttagctttggagttaaagaaaagaaaatgggtataagaggttcagctacgagtgaattaatatttgaggattgcagaatacctaaagaaaatttacttggaaaagaaggtcaaggatttaagatagcaatgtctactcttgatggtggtagaattggtatagctgcacaagctttaggtttagcacaaggtgctcttgatgaaactgttaaatatgtaaaagaaagagtacaatttggtagaccattatcaaaattccaaaatacacaattccaattagctgatatggaagttaaggtacaagcggctagacaccttgtatatcaagcagctataaataaagacttaggaaaaccttatggagtagaagcagcaatggcaaaattatttgcagctgaaacagctatggaagttactacaaaagctgtacaacttcatggaggatatggatacactcgtgactatccagtagaaagaatgatgagagatgctaagataactgaaatatatgaaggaactagtgaagttcaaagaatggttatttcaggaaaactattaaaatagtaagaaggagatatacatatggaggaaggatttatgaatatagtcgtttgtataaaacaagttccagatacaacagaagttaaactagatcctaatacaggtactttaattagagatggagtaccaagtataataaaccctgatgataaagcaggtttagaagaagctataaaattaaaagaagaaatgggtgctcatgtaactgttataacaatgggacctcctcaagcagatatggctttaaaagaagctttagcaatgggtgcagatagaggtatattattaacagatagagcatttgcgggtgctgatacttgggcaacttcatcagcattagcaggagcattaaaaaatatagattttgatattataatagctggaagacaggcgatagatggagatactgcacaagttggacctcaaatagctgaacatttaaatcttccatcaataacatatgctgaagaaataaaaactgaaggtgaatatgtattagtaaaaagacaatttgaagattgttgccatgacttaaaagttaaaatgccatgccttataacaactcttaaagatatgaacacaccaagatacatgaaagttggaagaatatatgatgctttcgaaaatgatgtagtagaaacatggactgtaaaagatatagaagttgacccttctaatttaggtcttaaaggttctccaactagtgtatttaaatcatttacaaaatcagttaaaccagctggtacaatatacaatgaagatgcgaaaacatcagctggaattatcatagataaattaaaagagaagtatatcatataataagaaggagatatacatatgggtaacgttttagtagtaatagaacaaagagaaaatgtaattcaaactgtttctttagaattactaggaaaggctacagaaatagcaaaagattatgatacaaaagtttctgcattacttttaggtagtaaggtagaaggtttaatagatacattagcacactatggtgcagatgaggtaatagtagtagatgatgaagctttagcagtgtatacaactgaaccatatacaaaagcagcttatgaagcaataaaagcagctgaccctatagttgtattatttggtgcaacttcaataggtagagatttagcgcctagagtttctgctagaatacatacaggtcttactgctgactgtacaggtcttgcagtagctgaagatacaaaattattattaatgacaagacctgcctttggtggaaatataatggcaacaatagtttgtaaagatttcagacctcaaatgtctacagttagaccaggggttatgaagaaaaatgaacctgatgaaactaaagaagctgtaattaaccgtttcaaggtagaatttaatgatgctgataaattagttcaagttgtacaagtaataaaagaagctaaaaaacaagttaaaatagaagatgctaagatattagtttctgctggacgtggaatgggtggaaaagaaaacttagacatactttatgaattagctgaaattataggtggagaagtttctggttctcgtgccactatagatgcaggttggttagataaagcaagacaagttggtcaaactggtaaaactgtaagaccagacctttatatagcatgtggtatatctggagcaatacaacatatagctggtatggaagatgctgagtttatagttgctataaataaaaatccagaagctccaatatttaaatatgctgatgttggtatagttggagatgttcataaagtgcttccagaacttatcagtcagttaagtgttgcaaaagaaaaaggtgaagttttagctaactaataagaaggagatatacatatgagagaagtagtaattgccagtgcagctagaacagcagtaggaagttttggaggagcatttaaatcagtttcagcggtagagttaggggtaacagcagctaaagaagctataaaaagagctaacataactccagatatgatagatgaatctcttttagggggagtacttacagcaggtcttggacaaaatatagcaagacaaatagcattaggagcaggaataccagtagaaaaaccagctatgactataaatatagtttgtggttctggattaagatctgtttcaatggcatctcaacttatagcattaggtgatgctgatataatgttagttggtggagctgaaaacatgagtatgtctccttatttagtaccaagtgcgagatatggtgcaagaatgggtgatgctgcttttgttgattcaatgataaaagatggattatcagacatatttaataactatcacatgggtattactgctgaaaacatagcagagcaatggaatataactagagaagaacaagatgaattagctcttgcaagtcaaaataaagctgaaaaagctcaagctgaaggaaaatttgatgaagaaatagttcctgttgttataaaaggaagaaaaggtgacactgtagtagataaagatgaatatattaagcctggcactacaatggagaaacttgctaagttaagacctgcatttaaaaaagatggaacagttactgctggtaatgcatcaggaataaatgatggtgctgctatgttagtagtaatggctaaagaaaaagctgaagaactaggaatagagcctcttgcaactatagtttcttatggaacagctggtgttgaccctaaaataatgggatatggaccagttccagcaactaaaaaagctttagaagctgctaatatgactattgaagatatagatttagttgaagctaatgaggcatttgctgcccaatctgtagctgtaataagagacttaaatatagatatgaataaagttaatgttaatggtggagcaatagctataggacatccaataggatgctcaggagcaagaatacttactacacttttatatgaaatgaagagaagagatgctaaaactggtcttgctacactttgtataggcggtggaatgggaactactttaatagttaagagatagtaagaaggagatatacatatgaaattagctgtaataggtagtggaactatgggaagtggtattgtacaaacttttgcaagttgtggacatgatgtatgtttaaagagtagaactcaaggtgctatagataaatgtttagctttattagataaaaatttaactaagttagttactaagggaaaaatggatgaagctacaaaagcagaaatattaagtcatgttagttcaactactaattatgaagatttaaaagatatggatttaataatagaagcatctgtagaagacatgaatataaagaaagatgttttcaagttactagatgaattatgtaaagaagatactatcttggcaacaaatacttcatcattatctataacagaaatagcttcttctactaagcgcccagataaagttataggaatgcatttctttaatccagttcctatgatgaaattagttgaagttataagtggtcagttaacatcaaaagttacttttgatacagtatttgaattatctaagagtatcaataaagtaccagtagatgtatctgaatctcctggatttgtagtaaatagaatacttatacctatgataaatgaagctgttggtatatatgcagatggtgttgcaagtaaagaagaaatagatgaagctatgaaattaggagcaaaccatccaatgggaccactagcattaggtgatttaatcggattagatgttgttttagctataatgaacgttttatatactgaatttggagatactaaatatagacctcatccacttttagctaaaatggttagagctaatcaattaggaagaaaaactaagataggattctatgattataataaataataagaaggagatatacatatgagtacaagtgatgttaaagtttatgagaatgtagctgttgaagtagatggaaatatatgtacagtgaaaatgaatagacctaaagcccttaatgcaataaattcaaagactttagaagaactttatgaagtatttgtagatattaataatgatgaaactattgatgttgtaatattgacaggggaaggaaaggcatttgtagctggagcagatattgcatacatgaaagatttagatgctgtagctgctaaagattttagtatcttaggagcaaaagcttttggagaaatagaaaatagtaaaaaagtagtgatagctgctgtaaacggatttgctttaggtggaggatgtgaacttgcaatggcatgtgatataagaattgcatctgctaaagctaaatttggtcagccagaagtaactcttggaataactccaggatatggaggaactcaaaggcttacaagattggttggaatggcaaaagcaaaagaattaatctttacaggtcaagttataaaagctgatgaagctgaaaaaatagggctagtaaatagagtcgttgagccagacattttaatagaagaagttgagaaattagctaagataatagctaaaaatgctcagcttgcagttagatactctaaagaagcaatacaacttggtgctcaaactgatataaatactggaatagatatagaatctaatttatttggtctttgtttttcaactaaagaccaaaaagaaggaatgtcagctttcgttgaaaagagagaagctaactttataaaagggtaataagaaggagatatacatatgagaagttttgaagaagtaattaagtttgcaaaagaaagaggacctaaaactatatcagtagcatgttgccaagataaagaagttttaatggcagttgaaatggctagaaaagaaaaaatagcaaatgccattttagtaggagatatagaaaagactaaagaaattgcaaaaagcatagacatggatatcgaaaattatgaactgatagatataaaagatttagcagaagcatctctaaaatctgttgaattagtttcacaaggaaaagccgacatggtaatgaaaggcttagtagacacatcaataatactaaaagcagttttaaataaagaagtaggtcttagaactggaaatgtattaagtcacgtagcagtatttgatgtagagggatatgatagattatttttcgtaactgacgcagctatgaacttagctcctgatacaaatactaaaaagcaaatcatagaaaatgcttgcacagtagcacattcattagatataagtgaaccaaaagttgctgcaatatgcgcaaaagaaaaagtaaatccaaaaatgaaagatacagttgaagctaaagaactagaagaaatgtatgaaagaggagaaatcaaaggttgtatggttggtgggccttttgcaattgataatgcagtatctttagaagcagctaaacataaaggtataaatcatcctgtagcaggacgagctgatatattattagccccagatattgaaggtggtaacatattatataaagctttggtattcttctcaaaatcaaaaaatgcaggagttatagttggggctaaagcaccaataatattaacttctagagcagacagtgaagaaactaaactaaactcaatagctttaggtgttttaatggcagcaaaggcataataagaaggagatatacatatgagcaaaatatttaaaatcttaacaataaatcctggttcgacatcaactaaaatagctgtatttgataatgaggatttagtatttgaaaaaactttaagacattcttcagaagaaataggaaaatatgagaaggtgtctgaccaatttgaatttcgtaaacaagtaatagaagaagctctaaaagaaggtggagtaaaaacatctgaattagatgctgtagtaggtagaggaggacttcttaaacctataaaaggtggtacttattcagtaagtgctgctatgattgaagatttaaaagtgggagttttaggagaacacgcttcaaacctaggtggaataatagcaaaacaaataggtgaagaagtaaatgttccttcatacatagtagaccctgttgttgtagatgaattagaagatgttgctagaatttctggtatgcctgaaataagtagagcaagtgtagtacatgctttaaatcaaaaggcaatagcaagaagatatgctagagaaataaacaagaaatatgaagatataaatcttatagttgcacacatgggtggaggagtttctgttggagctcataaaaatggtaaaatagtagatgttgcaaacgcattagatggagaaggacctttctctccagaaagaagtggtggactaccagtaggtgcattagtaaaaatgtgctttagtggaaaatatactcaagatgaaattaaaaagaaaataaaaggtaatggcggactagttgcatacttaaacactaatgatgctagagaagttgaagaaagaattgaagctggtgatgaaaaagctaaattagtatatgaagctatggcatatcaaatctctaaagaaataggagctagtgctgcagttcttaagggagatgtaaaagcaatattattaactggtggaatcgcatattcaaaaatgtttacagaaatgattgcagatagagttaaatttatagcagatgtaaaagtttatccaggtgaagatgaaatgattgcattagctcaaggtggacttagagttttaactggtgaagaagaggctcaagtttatgataactaataa

SEQ ID NO: 406 - DNA, 6224 bp, Artificial Sequence
  Description of Artificial Sequence: Synthetic polynucleotide
ctcgagttcattatccatcctccatcgccacgatagttcatggcgataggtagaatagcaatgaacgattatccctatcaagcattctgactgataattgctcacacgaattcattaaagaggagaaaggtaccatgatcgtaaaacctatggtacgcaacaatatctgcctgaacgcccatcctcagggctgcaagaagggagtggaagatcagattgaatataccaagaaacgcattaccgcagaagtcaaagctggcgcaaaagctccaaaaaacgttctggtgcttggctgctcaaatggttacggcctggcgagccgcattactgctgcgttcggatacggggctgcgaccatcggcgtgtcctttgaaaaagcgggttcagaaaccaaatatggtacaccgggatggtacaataatttggcatttgatgaagcggcaaaacgcgagggtctttatagcgtgacgatcgacggcgatgcgttttcagacgagatcaaggcccaggtaattgaggaagccaaaaaaaaaggtatcaaatttgatctgatcgtatacagcttggccagcccagtacgtactgatcctgatacaggtatcatgcacaaaagcgttttgaaaccctttggaaaaacgttcacaggcaaaacagtagatccgtttactggcgagctgaaggaaatctccgcggaaccagcaaatgacgaggaagcagccgccactgttaaagttatggggggtgaagattgggaacgttggattaagcagctgtcgaaggaaggcctcttagaagaaggctgtattaccttggcctatagttatattggccctgaagctacccaagctttgtaccgtaaaggcacaatcggcaaggccaaagaacacctggaggccacagcacaccgtctcaacaaagagaacccgtcaatccgtgccttcgtgagcgtgaataaaggcctggtaacccgcgcaagcgccgtaatcccggtaatccctctgtatctcgccagcttgttcaaagtaatgaaagagaagggcaatcatgaaggttgtattgaacagatcacgcgtctgtacgccgagcgcctgtaccgtaaagatggtacaattccagttgatgaggaaaatcgcattcgcattgatgattgggagttagaagaagacgtccagaaagcggtatccgcgttgatggagaaagtcacgggtgaaaacgcagaatctctcactgacttagcggggtaccgccatgatttcttagctagtaacggctttgatgtagaaggtattaattatgaagcggaagttgaacgcttcgaccgtatctgataagaaggagatatacatatgagagaagtagtaattgccagtgcagctagaacagcagtaggaagttttggaggagcatttaaatcagtttcagcggtagagttaggggtaacagcagctaaagaagctataaaaagagctaacataactccagatatgatagatgaatctcttttagggggagtacttacagcaggtcttggacaaaatatagcaagacaaatagcattaggagcaggaataccagtagaaaaaccagctatgactataaatatagtttgtggttctggattaagatctgtttcaatggcatctcaacttatagcattaggtgatgctgatataatgttagttggtggagctgaaaacatgagtatgtctccttatttagtaccaagtgcgagatatggtgcaagaatgggtgatgctgcttttgttgattcaatgataaaagatggattatcagacatatttaataactatcacatgggtattactgctgaaaacatagcagagcaatggaatataactagagaagaacaagatgaattagctcttgcaagtcaaaataaagctgaaaaagctcaagctgaaggaaaatttgatgaagaaatagttcctgttgttataaaaggaagaaaaggtgacactgtagtagataaagatgaatatattaagcctggcactacaatggagaaacttgctaagttaagacctgcatttaaaaaagatggaacagttactgctggtaatgcatcaggaataaatgatggtgctgctatgttagtagtaatggctaaagaaaaagctgaagaactaggaatagagcctcttgcaactatagtttcttatggaacagctggtgttgaccctaaaataatgggatatggaccagttccagcaactaaaaaagctttagaagctgctaatatgactattgaagatatagatttagttgaagctaatgaggcatttgctgcccaatctgtagctgtaataagagacttaaatatagatatgaataaagttaatgttaatggtggagcaatagctataggacatccaataggatgctcaggagcaagaatacttactacacttttatatgaaatgaagagaagagatgctaaaactggtcttgctacactttgtataggcggtggaatgggaactactttaatagttaagagatagtaagaaggagatatacatatgaaattagctgtaataggtagtggaactatgggaagtggtattgtacaaacttttgcaagttgtggacatgatgtatgtttaaagagtagaactcaaggtgctatagataaatgtttagctttattagataaaaatttaactaagttagttactaagggaaaaatggatgaagctacaaaagcagaaatattaagtcatgttagttcaactactaattatgaagatttaaaagatatggatttaataatagaagcatctgtagaagacatgaatataaagaaagatgttttcaagttactagatgaattatgtaaagaagatactatcttggcaacaaatacttcatcattatctataacagaaatagcttcttctactaagcgcccagataaagttataggaatgcatttctttaatccagttcctatgatgaaattagttgaagttataagtggtcagttaacatcaaaagttacttttgatacagtatttgaattatctaagagtatcaataaagtaccagtagatgtatctgaatctcctggatttgtagtaaatagaatacttatacctatgataaatgaagctgttggtatatatgcagatggtgttgcaagtaaagaagaaatagatgaagctatgaaattaggagcaaaccatccaatgggaccactagcattaggtgatttaatcggattagatgttgttttagctataatgaacgttttatatactgaatttggagatactaaatatagacctcatccacttttagctaaaatggttagagctaatcaattaggaagaaaaactaagataggattctatgattataataaataataagaaggagatatacatatgagtacaagtgatgttaaagtttatgagaatgtagctgttgaagtagatggaaatatatgtacagtgaaaatgaatagacctaaagcccttaatgcaataaattcaaagactttagaagaactttatgaagtatttgtagatattaataatgatgaaactattgatgttgtaatattgacaggggaaggaaaggcatttgtagctggagcagatattgcatacatgaaagatttagatgctgtagctgctaaagattttagtatcttaggagcaaaagcttttggagaaatagaaaatagtaaaaaagtagtgatagctgctgtaaacggatttgctttaggtggaggatgtgaacttgcaatggcatgtgatataagaattgcatctgctaaagctaaatttggtcagccagaagtaactcttggaataactccaggatatggaggaactcaaaggcttacaagattggttggaatggcaaaagcaaaagaattaatctttacaggtcaagttataaaagctgatgaagctgaaaaaatagggctagtaaatagagtcgttgagccagacattttaatagaagaagttgagaaattagctaagataatagctaaaaatgctcagcttgcagttagatactctaaagaagcaatacaacttggtgctcaaactgatataaatactggaatagatatagaatctaatttatttggtctttgtttttcaactaaagaccaaaaagaaggaatgtcagctttcgttgaaaagagagaagctaactttataaaagggtaataagaaggagatatacatatgagaagttttgaagaagtaattaagtttgcaaaagaaagaggacctaaaactatatcagtagcatgttgccaagataaagaagttttaatggcagttgaaatggctagaaaagaaaaaatagcaaatgccattttagtaggagatatagaaaagactaaagaaattgcaaaaagcatagacatggatatcgaaaattatgaactgatagatataaaagatttagcagaagcatctctaaaatctgttgaattagtttcacaaggaaaagccgacatggtaatgaaaggcttagtagacacatcaataatactaaaagcagttttaaataaagaagtaggtcttagaactggaaatgtattaagtcacgtagcagtatttgatgtagagggatatgatagattatttttcgtaactgacgcagctatgaacttagctcctgatacaaatactaaaaagcaaatcatagaaaatgcttgcacagtagcacattcattagatataagtgaaccaaaagttgctgcaatatgcgcaaaagaaaaagtaaatccaaaaatgaaagatacagttgaagctaaagaactagaagaaatgtatgaaagaggagaaatcaaaggttgtatggttggtgggccttttgcaattgataatgcagtatctttagaagcagctaaacataaaggtataaatcatcctgtagcaggacgagctgatatattattagccccagatattgaaggtggtaacatattatataaagctttggtattcttctcaaaatcaaaaaatgcaggagttatagttggggctaaagcaccaataatattaacttctagagcagacagtgaagaaactaaactaaactcaatagctttaggtgttttaatggcagcaaaggcataataagaaggagatatacatatgagcaaaatatttaaaatcttaacaataaatcctggttcgacatcaactaaaatagctgtatttgataatgaggatttagtatttgaaaaaactttaagacattcttcagaagaaataggaaaatatgagaaggtgtctgaccaatttgaatttcgtaaacaagtaatagaagaagctctaaaagaaggtggagtaaaaacatctgaattagatgctgtagtaggtagaggaggacttcttaaacctataaaaggtggtacttattcagtaagtgctgctatgattgaagatttaaaagtgggagttttaggagaacacgcttcaaacctaggtggaataatagcaaaacaaataggtgaagaagtaaatgttccttcatacatagtagaccctgttgttgtagatgaattagaagatgttgctagaatttctggtatgcctgaaataagtagagcaagtgtagtacatgctttaaatcaaaaggcaatagcaagaagatatgctagagaaataaacaagaaatatgaagatataaatcttatagttgcacacatgggtggaggagtttctgttggagctcataaaaatggtaaaatagtagatgttgcaaacgcattagatggagaaggacctttctctccagaaagaagtggtggactaccagtaggtgcattagtaaaaatgtgctttagtggaaaatatactcaagatgaaattaaaaagaaaataaaaggtaatggcggactagttgcatacttaaacactaatgatgctagagaagttgaagaaagaattgaagctggtgatgaaaaagctaaattagtatatgaagctatggcatatcaaatctctaaagaaataggagctagtgctgcagttcttaagggagatgtaaaagcaatattattaactggtggaatcgcatattcaaaaatgtttacagaaatgattgcagatagagttaaatttatagcagatgtaaaagtttatccaggtgaagatgaaatgattgcattagctcaaggtggacttagagttttaactggtgaagaagaggctcaagtttatgataactaataa

SEQ ID NO: 407 - DNA, 3118 bp, Artificial Sequence
  Description of Artificial Sequence: Synthetic polynucleotide
ctcgagatgctagcaattgtgagcggataacaattgacattgtgagcggataacaagatactgagcacatcagcaggacgcactgaccttaattaaaagaattcattaaagaggagaaaggtaccatgaatattcgtgatcttgagtacctggtggcattggctgaacaccgccattttcggcgtgcggcagattcctgccacgttagccagccgacgcttagcgggcaaattcgtaagctggaagatgagctgggcgtgatgttgctggagcggaccagccgtaaagtgttgttcacccaggcgggaatgctgctggtggatcaggcgcgtaccgtgctgcgtgaggtgaaagtccttaaagagatggcaagccagcagggcgagacgatgtccggaccgctgcacattggtttgattcccacagttggaccgtacctgctaccgcatattatccctatgctgcaccagacctttccaaagctggaaatgtatctgcatgaagcacagacccaccagttactggcgcaactggacagcggcaaactcgattgcgtgatcctcgcgctggtgaaagagagcgaagcattcattgaagtgccgttgtttgatgagccaatgttgctggctatctatgaagatcacccgtgggcgaaccgcgaatgcgtaccgatggccgatctggcaggggaaaaactgctgatgctggaagatggtcactgtttgcgcgatcaggcaatgggtttctgttttgaagccggggcggatgaagatacacacttccgcgcgaccagcctggaaactctgcgcaacatggtggcggcaggtagcgggatcactttactgccagcgctggctgtgccgccggagcgcaaacgcgatggggttgtttatctgccgtgcattaagccggaaccacgccgcactattggcctggtttatcgtcctggctcaccgctgcgcagccgctatgagcagctggcagaggccatccgcgcaagaatggatggccatttcgataaagttttaaaacaggcggtttaaggatcccatggtacgcgtgctagaggcatcaaataaaacgaaaggctcagtcgaaagactgggcctttcgttttatctgttgtttgtcggtgaacgctctcctgagtaggacaaatccgccgccctagacctaggggatatattccgcttcctcgctcactgactcgctacgctcggtcgttcgactgcggcgagcggaaatggcttacgaacggggcggagatttcctggaagatgccaggaagatacttaacagggaagtgagagggccgcggcaaagccgtttttccataggctccgcccccctgacaagcatcacgaaatctgacgctcaaatcagtggtggcgaaacccgacaggactataaagataccaggcgtttccccctggcggctccctcgtgcgctctcctgttcctgcctttcggtttaccggtgtcattccgctgttatggccgcgtttgtctcattccacgcctgacactcagttccgggtaggcagttcgctccaagctggactgtatgcacgaaccccccgttcagtccgaccgctgcgccttatccggtaactatcgtcttgagtccaacccggaaagacatgcaaaagcaccactggcagcagccactggtaattgatttagaggagttagtcttgaagtcatgcgccggttaaggctaaactgaaaggacaagttttggtgactgcgctcctccaagccagttacctcggttcaaagagttggtagctcagagaaccttcgaaaaaccgccctgcaaggcggttttttcgttttcagagcaagagattacgcgcagaccaaaacgatctcaagaagatcatcttattaatcagataaaatatttctagatttcagtgcaatttatctcttcaaatgtagcacctgaagtcagccccatacgatataagttgttactagtgcttggattctcaccaataaaaaacgcccggcggcaaccgagcgttctgaacaaatccagatggagttctgaggtcattactggatctatcaacaggagtccaagcgagctctcgaaccccagagtcccgctcagaagaactcgtcaagaaggcgatagaaggcgatgcgctgcgaatcgggagcggcgataccgtaaagcacgaggaagcggtcagcccattcgccgccaagctcttcagcaatatcacgggtagccaacgctatgtcctgatagcggtccgccacacccagccggccacagtcgatgaatccagaaaagcggccattttccaccatgatattcggcaagcaggcatcgccatgggtcacgacgagatcctcgccgtcgggcatgcgcgccttgagcctggcgaacagttcggctggcgcgagcccctgatgctcttcgtccagatcatcctgatcgacaagaccggcttccatccgagtacgtgctcgctcgatgcgatgtttcgcttggtggtcgaatgggcaggtagccggatcaagcgtatgcagccgccgcattgcatcagccatgatggatactttctcggcaggagcaaggtgagatgacaggagatcctgccccggcacttcgcccaatagcagccagtcccttcccgcttcagtgacaacgtcgagcacagctgcgcaaggaacgcccgtcgtggccagccacgatagccgcgctgcctcgtcctgcagttcattcagggcaccggacaggtcggtcttgacaaaaagaaccgggcgcccctgcgctgacagccggaacacggcggcatcagagcagccgattgtctgttgtgcccagtcatagccgaatagcctctccacccaagcggccggagaacctgcgtgcaatccatcttgttcaatcatgcgaaacgatcctcatcctgtctcttgatcagatcttgatcccctgcgccatcagatccttggcggcaagaaagccatccagtttactttgcagggcttcccaaccttaccagagggcgccccagctggcaattccgacgtctaagaaaccattattatcatgacattaacctataaaaataggcgtatcacgaggccctttcgtcttcac

SEQ ID NO: 408 - DNA, 5081 bp, Artificial Sequence
  Description of Artificial Sequence: Synthetic polynucleotide
ctcgagttcattatccatcctccatcgccacgatagttcatggcgataggtagaatagcaatgaacgattatccctatcaagcattctgactgataattgctcacacgaattcattaaagaggagaaaggtaccatgatcgtaaaacctatggtacgcaacaatatctgcctgaacgcccatcctcagggctgcaagaagggagtggaagatcagattgaatataccaagaaacgcattaccgcagaagtcaaagctggcgcaaaagctccaaaaaacgttctggtgcttggctgctcaaatggttacggcctggcgagccgcattactgctgcgttcggatacggggctgcgaccatcggcgtgtcctttgaaaaagcgggttcagaaaccaaatatggtacaccgggatggtacaataatttggcatttgatgaagcggcaaaacgcgagggtctttatagcgtgacgatcgacggcgatgcgttttcagacgagatcaaggcccaggtaattgaggaagccaaaaaaaaaggtatcaaatttgatctgatcgtatacagcttggccagcccagtacgtactgatcctgatacaggtatcatgcacaaaagcgttttgaaaccctttggaaaaacgttcacaggcaaaacagtagatccgtttactggcgagctgaaggaaatctccgcggaaccagcaaatgacgaggaagcagccgccactgttaaagttatggggggtgaagattgggaacgttggattaagcagctgtcgaaggaaggcctcttagaagaaggctgtattaccttggcctatagttatattggccctgaagctacccaagctttgtaccgtaaaggcacaatcggcaaggccaaagaacacctggaggccacagcacaccgtctcaacaaagagaacccgtcaatccgtgccttcgtgagcgtgaataaaggcctggtaacccgcgcaagcgccgtaatcccggtaatccctctgtatctcgccagcttgttcaaagtaatgaaagagaagggcaatcatgaaggttgtattgaacagatcacgcgtctgtacgccgagcgcctgtaccgtaaagatggtacaattccagttgatgaggaaaatcgcattcgcattgatgattgggagttagaagaagacgtccagaaagcggtatccgcgttgatggagaaagtcacgggtgaaaacgcagaatctctcactgacttagcggggtaccgccatgatttcttagctagtaacggctttgatgtagaaggtattaattatgaagcggaagttgaacgcttcgaccgtatctgataagaaggagatatacatatgagagaagtagtaattgccagtgcagctagaacagcagtaggaagttttggaggagcatttaaatcagtttcagcggtagagttaggggtaacagcagctaaagaagctataaaaagagctaacataactccagatatgatagatgaatctcttttagggggagtacttacagcaggtcttggacaaaatatagcaagacaaatagcattaggagcaggaataccagtagaaaaaccagctatgactataaatatagtttgtggttctggattaagatctgtttcaatggcatctcaacttatagcattaggtgatgctgatataatgttagttggtggagctgaaaacatgagtatgtctccttatttagtaccaagtgcgagatatggtgcaagaatgggtgatgctgcttttgttgattcaatgataaaagatggattatcagacatatttaataactatcacatgggtattactgctgaaaacatagcagagcaatggaatataactagagaagaacaagatgaattagctcttgcaagtcaaaataaagctgaaaaagctcaagctgaaggaaaatttgatgaagaaatagttcctgttgttataaaaggaagaaaaggtgacactgtagtagataaagatgaatatattaagcctggcactacaatggagaaacttgctaagttaagacctgcatttaaaaaagatggaacagttactgctggtaatgcatcaggaataaatgatggtgctgctatgttagtagtaatggctaaagaaaaagctgaagaactaggaatagagcctcttgcaactatagtttcttatggaacagctggtgttgaccctaaaataatgggatatggaccagttccagcaactaaaaaagctttagaagctgctaatatgactattgaagatatagatttagttgaagctaatgaggcatttgctgcccaatctgtagctgtaataagagacttaaatatagatatgaataaagttaatgttaatggtggagcaatagctataggacatccaataggatgctcaggagcaagaatacttactacacttttatatgaaatgaagagaagagatgctaaaactggtcttgctacactttgtataggcggtggaatgggaactactttaatagttaagagatagtaagaaggagatatacatatgaaattagctgtaataggtagtggaactatgggaagtggtattgtacaaacttttgcaagttgtggacatgatgtatgtttaaagagtagaactcaaggtgctatagataaatgtttagctttattagataaaaatttaactaagttagttactaagggaaaaatggatgaagctacaaaagcagaaatattaagtcatgttagttcaactactaattatgaagatttaaaagatatggatttaataatagaagcatctgtagaagacatgaatataaagaaagatgttttcaagttactagatgaattatgtaaagaagatactatcttggcaacaaatacttcatcattatctataacagaaatagcttcttctactaagcgcccagataaagttataggaatgcatttctttaatccagttcctatgatgaaattagttgaagttataagtggtcagttaacatcaaaagttacttttgatacagtatttgaattatctaagagtatcaataaagtaccagtagatgtatctgaatctcctggatttgtagtaaatagaatacttatacctatgataaatgaagctgttggtatatatgcagatggtgttgcaagtaaagaagaaatagatgaagctatgaaattaggagcaaaccatccaatgggaccactagcattaggtgatttaatcggattagatgttgttttagctataatgaacgttttatatactgaatttggagatactaaatatagacctcatccacttttagctaaaatggttagagctaatcaattaggaagaaaaactaagataggattctatgattataataaataataagaaggagatatacatatgagtacaagtgatgttaaagtttatgagaatgtagctgttgaagtagatggaaatatatgtacagtgaaaatgaatagacctaaagcccttaatgcaataaattcaaagactttagaagaactttatgaagtatttgtagatattaataatgatgaaactattgatgttgtaatattgacaggggaaggaaaggcatttgtagctggagcagatattgcatacatgaaagatttagatgctgtagctgctaaagattttagtatcttaggagcaaaagcttttggagaaatagaaaatagtaaaaaagtagtgatagctgctgtaaacggatttgctttaggtggaggatgtgaacttgcaatggcatgtgatataagaattgcatctgctaaagctaaatttggtcagccagaagtaactcttggaataactccaggatatggaggaactcaaaggcttacaagattggttggaatggcaaaagcaaaagaattaatctttacaggtcaagttataaaagctgatgaagctgaaaaaatagggctagtaaatagagtcgttgagccagacattttaatagaagaagttgagaaattagctaagataatagctaaaaatgctcagcttgcagttagatactctaaagaagcaatacaacttggtgctcaaactgatataaatactggaatagatatagaatctaatttatttggtctttgtttttcaactaaagaccaaaaagaaggaatgtcagctttcgttgaaaagagagaagctaactttataaaagggtaataagaaggagatatacatatgagtcaggcgctaaaaaatttactgacattgttaaatctggaaaaaattgaggaaggactctttcgcggccagagtgaagatttaggtttacgccaggtgtttggcggccaggtcgtgggtcaggccttgtatgctgcaaaagagaccgtccctgaagagcggctggtacattcgtttcacagctactttcttcgccctggcgatagtaagaagccgattatttatgatgtcgaaacgctgcgtgacggtaacagcttcagcgcccgccgggttgctgctattcaaaacggcaaaccgattttttatatgactgcctctttccaggcaccagaagcgggtttcgaacatcaaaaaacaatgccgtccgcgccagcgcctgatggcctcccttcggaaacgcaaatcgcccaatcgctggcgcacctgctgccgccagtgctgaaagataaattcatctgcgatcgtccgctggaagtccgtccggtggagtttcataacccactgaaaggtcacgtcgcagaaccacatcgtcaggtgtggatccgcgcaaatggtagcgtgccggatgacctgcgcgttcatcagtatctgctcggttacgcttctgatcttaacttcctgccggtagctctacagccgcacggcatcggttttctcgaaccggggattcagattgccaccattgaccattccatgtggttccatcgcccgtttaatttgaatgaatggctgctgtatagcgtggagagcacctcggcgtccagcgcacgtggctttgtgcgcggtgagttttatacccaagacggcgtactggttgcctcgaccgttcaggaaggggtgatgcgtaatcacaattaa

SEQ ID NO: 409-415 - skipped (7 entries)

SEQ ID NO: 416 - DNA, 5160 bp, Artificial Sequence
  Description of Artificial Sequence: Synthetic polynucleotide
ggtaccagttgttcttattggtggtgttgctttatggttgcatcgtagtaaatggttgtaacaaaagcaatttttccggctgtctgtatacaaaaacgccgcaaagtttgagcgaagtcaataaactctctacccattcagggcaatatctctcttggatccaaagtgaactctagaaataattttgtttaactttaagaaggagatatacatatgatcgtaaaacctatggtacgcaacaatatctgcctgaacgcccatcctcagggctgcaagaagggagtggaagatcagattgaatataccaagaaacgcattaccgcagaagtcaaagctggcgcaaaagctccaaaaaacgttctggtgcttggctgctcaaatggttacggcctggcgagccgcattactgctgcgttcggatacggggctgcgaccatcggcgtgtcctttgaaaaagcgggttcagaaaccaaatatggtacaccgggatggtacaataatttggcatttgatgaagcggcaaaacgcgagggtctttatagcgtgacgatcgacggcgatgcgttttcagacgagatcaaggcccaggtaattgaggaagccaaaaaaaaaggtatcaaatttgatctgatcgtatacagcttggccagcccagtacgtactgatcctgatacaggtatcatgcacaaaagcgttttgaaaccctttggaaaaacgttcacaggcaaaacagtagatccgtttactggcgagctgaaggaaatctccgcggaaccagcaaatgacgaggaagcagccgccactgttaaagttatggggggtgaagattgggaacgttggattaagcagctgtcgaaggaaggcctcttagaagaaggctgtattaccttggcctatagttatattggccctgaagctacccaagctttgtaccgtaaaggcacaatcggcaaggccaaagaacacctggaggccacagcacaccgtctcaacaaagagaacccgtcaatccgtgccttcgtgagcgtgaataaaggcctggtaacccgcgcaagcgccgtaatcccggtaatccctctgtatctcgccagcttgttcaaagtaatgaaagagaagggcaatcatgaaggttgtattgaacagatcacgcgtctgtacgccgagcgcctgtaccgtaaagatggtacaattccagttgatgaggaaaatcgcattcgcattgatgattgggagttagaagaagacgtccagaaagcggtatccgcgttgatggagaaagtcacgggtgaaaacgcagaatctctcactgacttagcggggtaccgccatgatttcttagctagtaacggctttgatgtagaaggtattaattatgaagcggaagttgaacgcttcgaccgtatctgataagaaggagatatacatatgagagaagtagtaattgccagtgcagctagaacagcagtaggaagttttggaggagcatttaaatcagtttcagcggtagagttaggggtaacagcagctaaagaagctataaaaagagctaacataactccagatatgatagatgaatctcttttagggggagtacttacagcaggtcttggacaaaatatagcaagacaaatagcattaggagcaggaataccagtagaaaaaccagctatgactataaatatagtttgtggttctggattaagatctgtttcaatggcatctcaacttatagcattaggtgatgctgatataatgttagttggtggagctgaaaacatgagtatgtctccttatttagtaccaagtgcgagatatggtgcaagaatgggtgatgctgcttttgttgattcaatgataaaagatggattatcagacatatttaataactatcacatgggtattactgctgaaaacatagcagagcaatggaatataactagagaagaacaagatgaattagctcttgcaagtcaaaataaagctgaaaaagctcaagctgaaggaaaatttgatgaagaaatagttcctgttgttataaaaggaagaaaaggtgacactgtagtagataaagatgaatatattaagcctggcactacaatggagaaacttgctaagttaagacctgcatttaaaaaagatggaacagttactgctggtaatgcatcaggaataaatgatggtgctgctatgttagtagtaatggctaaagaaaaagctgaagaactaggaatagagcctcttgcaactatagtttcttatggaacagctggtgttgaccctaaaataatgggatatggaccagttccagcaactaaaaaagctttagaagctgctaatatgactattgaagatatagatttagttgaagctaatgaggcatttgctgcccaatctgtagctgtaataagagacttaaatatagatatgaataaagttaatgttaatggtggagcaatagctataggacatccaataggatgctcaggagcaagaatacttactacacttttatatgaaatgaagagaagagatgctaaaactggtcttgctacactttgtataggcggtggaatgggaactactttaatagttaagagatagtaagaaggagatatacatatgaaattagctgtaataggtagtggaactatgggaagtggtattgtacaaacttttgcaagttgtggacatgatgtatgtttaaagagtagaactcaaggtgctatagataaatgtttagctttattagataaaaatttaactaagttagttactaagggaaaaatggatgaagctacaaaagcagaaatattaagtcatgttagttcaactactaattatgaagatttaaaagatatggatttaataatagaagcatctgtagaagacatgaatataaagaaagatgttttcaagttactagatgaattatgtaaagaagatactatcttggcaacaaatacttcatcattatctataacagaaatagcttcttctactaagcgcccagataaagttataggaatgcatttctttaatccagttcctatgatgaaattagttgaagttataagtggtcagttaacatcaaaagttacttttgatacagtatttgaattatctaagagtatcaataaagtaccagtagatgtatctgaatctcctggatttgtagtaaatagaatacttatacctatgataaatgaagctgttggtatatatgcagatggtgttgcaagtaaagaagaaatagatgaagctatgaaattaggagcaaaccatccaatgggaccactagcattaggtgatttaatcggattagatgttgttttagctataatgaacgttttatatactgaatttggagatactaaatatagacctcatccacttttagctaaaatggttagagctaatcaattaggaagaaaaactaagataggattctatgattataataaataataagaaggagatatacatatgagtacaagtgatgttaaagtttatgagaatgtagctgttgaagtagatggaaatatatgtacagtgaaaatgaatagacctaaagcccttaatgcaataaattcaaagactttagaagaactttatgaagtatttgtagatattaataatgatgaaactattgatgttgtaatattgacaggggaaggaaaggcatttgtagctggagcagatattgcatacatgaaagatttagatgctgtagctgctaaagattttagtatcttaggagcaaaagcttttggagaaatagaaaatagtaaaaaagtagtgatagctgctgtaaacggatttgctttaggtggaggatgtgaacttgcaatggcatgtgatataagaattgcatctgctaaagctaaatttggtcagccagaagtaactcttggaataactccaggatatggaggaactcaaaggcttacaagattggttggaatggcaaaagcaaaagaattaatctttacaggtcaagttataaaagctgatgaagctgaaaaaatagggctagtaaatagagtcgttgagccagacattttaatagaagaagttgagaaattagctaagataatagctaaaaatgctcagcttgcagttagatactctaaagaagcaatacaacttggtgctcaaactgatataaatactggaatagatatagaatctaatttatttggtctttgtttttcaactaaagaccaaaaagaaggaatgtcagctttcgttgaaaagagagaagctaactttataaaagggtaataagaaggagatatacatatgagtcaggcgctaaaaaatttactgacattgttaaatctggaaaaaattgaggaaggactctttcgcggccagagtgaagatttaggtttacgccaggtgtttggcggccaggtcgtgggtcaggccttgtatgctgcaaaagagaccgtccctgaagagcggctggtacattcgtttcacagctactttcttcgccctggcgatagtaagaagccgattatttatgatgtcgaaacgctgcgtgacggtaacagcttcagcgcccgccgggttgctgctattcaaaacggcaaaccgattttttatatgactgcctctttccaggcaccagaagcgggtttcgaacatcaaaaaacaatgccgtccgcgccagcgcctgatggcctcccttcggaaacgcaaatcgcccaatcgctggcgcacctgctgccgccagtgctgaaagataaattcatctgcgatcgtccgctggaagtccgtccggtggagtttcataacccactgaaaggtcacgtcgcagaaccacatcgtcaggtgtggatccgcgcaaatggtagcgtgccggatgacctgcgcgttcatcagtatctgctcggttacgcttctgatcttaacttcctgccggtagctctacagccgcacggcatcggttttctcgaaccggggattcagattgccaccattgaccattccatgtggttccatcgcccgtttaatttgaatgaatggctgctgtatagcgtggagagcacctcggcgtccagcgcacgtggctttgtgcgcggtgagttttatacccaagacggcgtactggttgcctcgaccgttcaggaaggggtgatgcgtaatcacaattaa

SEQ ID NO: 417 - DNA, 6300 bp, Artificial Sequence
  Description of Artificial Sequence: Synthetic polynucleotide
ggtaccagttgttcttattggtggtgttgctttatggttgcatcgtagtaaatggttgtaacaaaagcaatttttccggctgtctgtatacaaaaacgccgcaaagtttgagcgaagtcaataaactctctacccattcagggcaatatctctcttggatccaaagtgaactctagaaataattttgtttaactttaagaaggagatatacatatgatcgtaaaacctatggtacgcaacaatatctgcctgaacgcccatcctcagggctgcaagaagggagtggaagatcagattgaatataccaagaaacgcattaccgcagaagtcaaagctggcgcaaaagctccaaaaaacgttctggtgcttggctgctcaaatggttacggcctggcgagccgcattactgctgcgttcggatacggggctgcgaccatcggcgtgtcctttgaaaaagcgggttcagaaaccaaatatggtacaccgggatggtacaataatttggcatttgatgaagcggcaaaacgcgagggtctttatagcgtgacgatcgacggcgatgcgttttcagacgagatcaaggcccaggtaattgaggaagccaaaaaaaaaggtatcaaatttgatctgatcgtatacagcttggccagcccagtacgtactgatcctgatacaggtatcatgcacaaaagcgttttgaaaccctttggaaaaacgttcacaggcaaaacagtagatccgtttactggcgagctgaaggaaatctccgcggaaccagcaaatgacgaggaagcagccgccactgttaaagttatggggggtgaagattgggaacgttggattaagcagctgtcgaaggaaggcctcttagaagaaggctgtattaccttggcctatagttatattggccctgaagctacccaagctttgtaccgtaaaggcacaatcggcaaggccaaagaacacctggaggccacagcacaccgtctcaacaaagagaacccgtcaatccgtgccttcgtgagcgtgaataaaggcctggtaacccgcgcaagcgccgtaatcccggtaatccctctgtatctcgccagcttgttcaaagtaatgaaagagaagggcaatcatgaaggttgtattgaacagatcacgcgtctgtacgccgagcgcctgtaccgtaaagatggtacaattccagttgatgaggaaaatcgcattcgcattgatgattgggagttagaagaagacgtccagaaagcggtatccgcgttgatggagaaagtcacgggtgaaaacgcagaatctctcactgacttagcggggtaccgccatgatttcttagctagtaacggctttgatgtagaaggtattaattatgaagcggaagttgaacgcttcgaccgtatctgataagaaggagatatacatatgagagaagtagtaattgccagtgcagctagaacagcagtaggaagttttggaggagcatttaaatcagtttcagcggtagagttaggggtaacagcagctaaagaagctataaaaagagctaacataactccagatatgatagatgaatctcttttagggggagtacttacagcaggtcttggacaaaatatagcaagacaaatagcattaggagcaggaataccagtagaaaaaccagctatgactataaatatagtttgtggttctggattaagatctgtttcaatggcatctcaacttatagcattaggtgatgctgatataatgttagttggtggagctgaaaacatgagtatgtctccttatttagtaccaagtgcgagatatggtgcaagaatgggtgatgctgcttttgttgattcaatgataaaagatggattatcagacatatttaataactatcacatgggtattactgctgaaaacatagcagagcaatggaatataactagagaagaacaagatgaattagctcttgcaagtcaaaataaagctgaaaaagctcaagctgaaggaaaatttgatgaagaaatagttcctgttgttataaaaggaagaaaaggtgacactgtagtagataaagatgaatatattaagcctggcactacaatggagaaacttgctaagttaagacctgcatttaaaaaagatggaacagttactgctggtaatgcatcaggaataaatgatggtgctgctatgttagtagtaatggctaaagaaaaagctgaagaactaggaatagagcctcttgcaactatagtttcttatggaacagctggtgttgaccctaaaataatgggatatggaccagttccagcaactaaaaaagctttagaagctgctaatatgactattgaagatatagatttagttgaagctaatgaggcatttgctgcccaatctgtagctgtaataagagacttaaatatagatatgaataaagttaatgttaatggtggagcaatagctataggacatccaataggatgctcaggagcaagaatacttactacacttttatatgaaatgaagagaagagatgctaaaactggtcttgctacactttgtataggcggtggaatgggaactactttaatagttaagagatagtaagaaggagatatacatatgaaattagctgtaataggtagtggaactatgggaagtggtattgtacaaacttttgcaagttgtggacatgatgtatgtttaaagagtagaactcaaggtgctatagataaatgtttagctttattagataaaaatttaactaagttagttactaagggaaaaatggatgaagctacaaaagcagaaatattaagtcatgttagttcaactactaattatgaagatttaaaagatatggatttaataatagaagcatctgtagaagacatgaatataaagaaagatgttttcaagttactagatgaattatgtaaagaagatactatcttggcaacaaatacttcatcattatctataacagaaatagcttcttctactaagcgcccagataaagttataggaatgcatttctttaatccagttcctatgatgaaattagttgaagttataagtggtcagttaacatcaaaagttacttttgatacagtatttgaattatctaagagtatcaataaagtaccagtagatgtatctgaatctcctggatttgtagtaaatagaatacttatacctatgataaatgaagctgttggtatatatgcagatggtgttgcaagtaaagaagaaatagatgaagctatgaaattaggagcaaaccatccaatgggaccactagcattaggtgatttaatcggattagatgttgttttagctataatgaacgttttatatactgaatttggagatactaaatatagacctcatccacttttagctaaaatggttagagctaatcaattaggaagaaaaactaagataggattctatgattataataaataataagaaggagatatacatatgagtacaagtgatgttaaagtttatgagaatgtagctgttgaagtagatggaaatatatgtacagtgaaaatgaatagacctaaagcccttaatgcaataaattcaaagactttagaagaactttatgaagtatttgtagatattaataatgatgaaactattgatgttgtaatattgacaggggaaggaaaggcatttgtagctggagcagatattgcatacatgaaagatttagatgctgtagctgctaaagattttagtatcttaggagcaaaagcttttggagaaatagaaaatagtaaaaaagtagtgatagctgctgtaaacggatttgctttaggtggaggatgtgaacttgcaatggcatgtgatataagaattgcatctgctaaagctaaatttggtcagccagaagtaactcttggaataactccaggatatggaggaactcaaaggcttacaagattggttggaatggcaaaagcaaaagaattaatctttacaggtcaagttataaaagctgatgaagctgaaaaaatagggctagtaaatagagtcgttgagccagacattttaatagaagaagttgagaaattagctaagataatagctaaaaatgctcagcttgcagttagatactctaaagaagcaatacaacttggtgctcaaactgatataaatactggaatagatatagaatctaatttatttggtctttgtttttcaactaaagaccaaaaagaaggaatgtcagctttcgttgaaaagagagaagctaactttataaaagggtaataagaaggagatatacatatgagaagttttgaagaagtaattaagtttgcaaaagaaagaggacctaaaactatatcagtagcatgttgccaagataaagaagttttaatggcagttgaaatggctagaaaagaaaaaatagcaaatgccattttagtaggagatatagaaaagactaaagaaattgcaaaaagcatagacatggatatcgaaaattatgaactgatagatataaaagatttagcagaagcatctctaaaatctgttgaattagtttcacaaggaaaagccgacatggtaatgaaaggcttagtagacacatcaataatactaaaagcagttttaaataaagaagtaggtcttagaactggaaatgtattaagtcacgtagcagtatttgatgtagagggatatgatagattatttttcgtaactgacgcagctatgaacttagctcctgatacaaatactaaaaagcaaatcatagaaaatgcttgcacagtagcacattcattagatataagtgaaccaaaagttgctgcaatatgcgcaaaagaaaaagtaaatccaaaaatgaaagatacagttgaagctaaagaactagaagaaatgtatgaaagaggagaaatcaaaggttgtatggttggtgggccttttgcaattgataatgcagtatctttagaagcagctaaacataaaggtataaatcatcctgtagcaggacgagctgatatattattagccccagatattgaaggtggtaacatattatataaagctttggtattcttctcaaaatcaaaaaatgcaggagttatagttggggctaaagcaccaataatattaacttctagagcagacagtgaagaaactaaactaaactcaatagctttaggtgttttaatggcagcaaaggcataataagaaggagatatacatatgagcaaaatatttaaaatcttaacaataaatcctggttcgacatcaactaaaatagctgtatttgataatgaggatttagtatttgaaaaaactttaagacattcttcagaagaaataggaaaatatgagaaggtgtctgaccaatttgaatttcgtaaacaagtaatagaagaagctctaaaagaaggtggagtaaaaacatctgaattagatgctgtagtaggtagaggaggacttcttaaacctataaaaggtggtacttattcagtaagtgctgctatgattgaagatttaaaagtgggagttttaggagaacacgcttcaaacctaggtggaataatagcaaaacaaataggtgaagaagtaaatgttccttcatacatagtagaccctgttgttgtagatgaattagaagatgttgctagaatttctggtatgcctgaaataagtagagcaagtgtagtacatgctttaaatcaaaaggcaatagcaagaagatatgctagagaaataaacaagaaatatgaagatataaatcttatagttgcacacatgggtggaggagtttctgttggagctcataaaaatggtaaaatagtagatgttgcaaacgcattagatggagaaggacctttctctccagaaagaagtggtggactaccagtaggtgcattagtaaaaatgtgctttagtggaaaatatactcaagatgaaattaaaaagaaaataaaaggtaatggcggactagttgcatacttaaacactaatgatgctagagaagttgaagaaagaattgaagctggtgatgaaaaagctaaattagtatatgaagctatggcatatcaaatctctaaagaaataggagctagtgctgcagttcttaagggagatgtaaaagcaatattattaactggtggaatcgcatattcaaaaatgtttacagaaatgattgcagatagagttaaatttatagcagatgtaaaagtttatccaggtgaagatgaaatgattgcattagctcaaggtggacttagagttttaactggtgaagaagaggctcaagtttatgataactaa

SEQ ID NO: 418 - DNA, 213 bp, Artificial Sequence
  Description of Artificial Sequence: Synthetic polynucleotide
ggtaccagttgttcttattggtggtgttgctttatggttgcatcgtagtaaatggttgtaacaaaagcaatttttccggctgtctgtatacaaaaacgccgcaaagtttgagcgaagtcaataaactctctacccattcagggcaatatctctcttggatccaaagtgaactctagaaataattttgtttaactttaagaaggagatatacat

SEQ ID NO: 419 - DNA, 43 bp, Artificial Sequence
  Description of Artificial Sequence: Synthetic oligonucleotide
ctctagaaataattttgtttaactttaagaaggagatatacat

SEQ ID NO: 420-422 - skipped (3 entries)

SEQ ID NO: 423 - DNA, 3383 bp, Artificial Sequence
  Description of Artificial Sequence: Synthetic polynucleotide
ggtaccgtcagcataacaccctgacctctcattaattgttcatgccgggcggcactatcgtcgtccggccttttcctctcttactctgctacgtacatctatttctataaatccgttcaatttgtctgttttttgcacaaacatgaaatatcagacaattccgtgacttaagaaaatttatacaaatcagcaatataccccttaaggagtatataaaggtgaatttgatttacatcaataagcggggttgctgaatcgttaaggtaggcggtaatagaaaagaaatcgaggcaaaaatgagcaaagtcagactcgcaattatggatcctctggccgtcgtattacaacgtcgtgactgggaaaaccctggcgttacccaacttaatcgccttgcggcacatccccctttcgccagctggcgtaatagcgaagaggcccgcaccgatcgcccttcccaacagttgcgcagcctgaatggcgaatggcgctttgcctggtttccggcaccagaagcggtgccggaaagctggctggagtgcgatcttcctgacgccgatactgtcgtcgtcccctcaaactggcagatgcacggttacgatgcgcctatctacaccaacgtgacctatcccattacggtcaatccgccgtttgttcccgcggagaatccgacaggttgttactcgctcacatttaatattgatgaaagctggctacaggaaggccagacgcgaattatttttgatggcgttaactcggcgtttcatctgtggtgcaacgggcgctgggtcggttacggccaggacagccgtttgccgtctgaatttgacctgagcgcatttttacgcgccggagaaaaccgcctcgcggtgatggtgctgcgctggagtgacggcagttatctggaagatcaggatatgtggcggatgagcggcattttccgtgacgtctcgttgctgcataaaccgaccacgcaaatcagcgatttccaagttaccactctctttaatgatgatttcagccgcgcggtactggaggcagaagttcagatgtacggcgagctgcgcgatgaactgcgggtgacggtttctttgtggcagggtgaaacgcaggtcgccagcggcaccgcgcctttcggcggtgaaattatcgatgagcgtggcggttatgccgatcgcgtcacactacgcctgaacgttgaaaatccggaactgtggagcgccgaaatcccgaatctctatcgtgcagtggttgaactgcacaccgccgacggcacgctgattgaagcagaagcctgcgacgtcggtttccgcgaggtgcggattgaaaatggtctgctgctgctgaacggcaagccgttgctgattcgcggcgttaaccgtcacgagcatcatcctctgcatggtcaggtcatggatgagcagacgatggtgcaggatatcctgctgatgaagcagaacaactttaacgccgtgcgctgttcgcattatccgaaccatccgctgtggtacacgctgtgcgaccgctacggcctgtatgtggtggatgaagccaatattgaaacccacggcatggtgccaatgaatcgtctgaccgatgatccgcgctggctacccgcgatgagcgaacgcgtaacgcggatggtgcagcgcgatcgtaatcacccgagtgtgatcatctggtcgctggggaatgaatcaggccacggcgctaatcacgacgcgctgtatcgctggatcaaatctgtcgatccttcccgcccggtacagtatgaaggcggcggagccgacaccacggccaccgatattatttgcccgatgtacgcgcgcgtggatgaagaccagcccttcccggcggtgccgaaatggtccatcaaaaaatggctttcgctgcctggagaaatgcgcccgctgatcctttgcgaatatgcccacgcgatgggtaacagtcttggcggcttcgctaaatactggcaggcgtttcgtcagtacccccgtttacagggcggcttcgtctgggactgggtggatcagtcgctgattaaatatgatgaaaacggcaacccgtggtcggcttacggcggtgattttggcgatacgccgaacgatcgccagttctgtatgaacggtctggtctttgccgaccgcacgccgcatccggcgctgacggaagcaaaacaccaacagcagtatttccagttccgtttatccgggcgaaccatcgaagtgaccagcgaatacctgttccgtcatagcgataacgagttcctgcactggatggtggcactggatggcaagccgctggcaagcggtgaagtgcctctggatgttggcccgcaaggtaagcagttgattgaactgcctgaactgccgcagccggagagcgccggacaactctggctaacggtacgcgtagtgcaaccaaacgcgaccgcatggtcagaagccggacacatcagcgcctggcagcaatggcgtctggcggaaaacctcagcgtgacactcccctccgcgtcccacgccatccctcaactgaccaccagcggaacggatttttgcatcgagctgggtaataagcgttggcaatttaaccgccagtcaggctttctttcacagatgtggattggcgatgaaaaacaactgctgaccccgctgcgcgatcagttcacccgtgcgccgctggataacgacattggcgtaagtgaagcgacccgcattgaccctaacgcctgggtcgaacgctggaaggcggcgggccattaccaggccgaagcggcgttgttgcagtgcacggcagatacacttgccgacgcggtgctgattacaaccgcccacgcgtggcagcatcaggggaaaaccttatttatcagccggaaaacctaccggattgatgggcacggtgagatggtcatcaatgtggatgttgcggtggcaagcgatacaccgcatccggcgcggattggcctgacctgccagctggcgcaggtctcagagcgggtaaactggctcggcctggggccgcaagaaaactatcccgaccgccttactgcagcctgttttgaccgctgggatctgccattgtcagacatgtataccccgtacgtcttcccgagcgaaaacggtctgcgctgcgggacgcgcgaattgaattatggcccacaccagtggcgcggcgacttccagttcaacatcagccgctacagccaacaacaactgatggaaaccagccatcgccatctgctgcacgcggaagaaggcacatggctgaatatcgacggtttccatatggggattggtggcgacgactcctggagcccgtcagtatcggcggaattccagctgagcgccggtcgctaccattaccagttggtctggtgtcaaaaataa

SEQ ID NO: 424 - DNA, 3258 bp, Artificial Sequence
  Description of Artificial Sequence: Synthetic polynucleotide
ggtacccatttcctctcatcccatccggggtgagagtcttttcccccgacttatggctcatgcatgcatcaaaaaagatgtgagcttgatcaaaaacaaaaaatatttcactcgacaggagtatttatattgcgcccgttacgtgggcttcgactgtaaatcagaaaggagaaaacacctatgacgacctacgatcgggatcctctggccgtcgtattacaacgtcgtgactgggaaaaccctggcgttacccaacttaatcgccttgcggcacatccccctttcgccagctggcgtaatagcgaagaggcccgcaccgatcgcccttcccaacagttgcgcagcctgaatggcgaatggcgctttgcctggtttccggcaccagaagcggtgccggaaagctggctggagtgcgatcttcctgacgccgatactgtcgtcgtcccctcaaactggcagatgcacggttacgatgcgcctatctacaccaacgtgacctatcccattacggtcaatccgccgtttgttcccgcggagaatccgacaggttgttactcgctcacatttaatattgatgaaagctggctacaggaaggccagacgcgaattatttttgatggcgttaactcggcgtttcatctgtggtgcaacgggcgctgggtcggttacggccaggacagccgtttgccgtctgaatttgacctgagcgcatttttacgcgccggagaaaaccgcctcgcggtgatggtgctgcgctggagtgacggcagttatctggaagatcaggatatgtggcggatgagcggcattttccgtgacgtctcgttgctgcataaaccgaccacgcaaatcagcgatttccaagttaccactctctttaatgatgatttcagccgcgcggtactggaggcagaagttcagatgtacggcgagctgcgcgatgaactgcgggtgacggtttctttgtggcagggtgaaacgcaggtcgccagcggcaccgcgcctttcggcggtgaaattatcgatgagcgtggcggttatgccgatcgcgtcacactacgcctgaacgttgaaaatccggaactgtggagcgccgaaatcccgaatctctatcgtgcagtggttgaactgcacaccgccgacggcacgctgattgaagcagaagcctgcgacgtcggtttccgcgaggtgcggattgaaaatggtctgctgctgctgaacggcaagccgttgctgattcgcggcgttaaccgtcacgagcatcatcctctgcatggtcaggtcatggatgagcagacgatggtgcaggatatcctgctgatgaagcagaacaactttaacgccgtgcgctgttcgcattatccgaaccatccgctgtggtacacgctgtgcgaccgctacggcctgtatgtggtggatgaagccaatattgaaacccacggcatggtgccaatgaatcgtctgaccgatgatccgcgctggctacccgcgatgagcgaacgcgtaacgcggatggtgcagcgcgatcgtaatcacccgagtgtgatcatctggtcgctggggaatgaatcaggccacggcgctaatcacgacgcgctgtatcgctggatcaaatctgtcgatccttcccgcccggtacagtatgaaggcggcggagccgacaccacggccaccgatattatttgcccgatgtacgcgcgcgtggatgaagaccagcccttcccggcggtgccgaaatggtccatcaaaaaatggctttcgctgcctggagaaatgcgcccgctgatcctttgcgaatatgcccacgcgatgggtaacagtcttggcggcttcgctaaatactggcaggcgtttcgtcagtacccccgtttacagggcggcttcgtctgggactgggtggatcagtcgctgattaaatatgatgaaaacggcaacccgtggtcggcttacggcggtgattttggcgatacgccgaacgatcgccagttctgtatgaacggtctggtctttgccgaccgcacgccgcatccggcgctgacggaagcaaaacaccaacagcagtatttccagttccgtttatccgggcgaaccatcgaagtgaccagcgaatacctgttccgtcatagcgataacgagttcctgcactggatggtggcactggatggcaagccgctggcaagcggtgaagtgcctctggatgttggcccgcaaggtaagcagttgattgaactgcctgaactgccgcagccggagagcgccggacaactctggctaacggtacgcgtagtgcaaccaaacgcgaccgcatggtcagaagccggacacatcagcgcctggcagcaatggcgtctggcggaaaacctcagcgtgacactcccctccgcgtcccacgccatccctcaactgaccaccagcggaacggatttttgcatcgagctgggtaataagcgttggcaatttaaccgccagtcaggctttctttcacagatgtggattggcgatgaaaaacaactgctgaccccgctgcgcgatcagttcacccgtgcgccgctggataacgacattggcgtaagtgaagcgacccgcattgaccctaacgcctgggtcgaacgctggaaggcggcgggccattaccaggccgaagcggcgttgttgcagtgcacggcagatacacttgccgacgcggtgctgattacaaccgcccacgcgtggcagcatcaggggaaaaccttatttatcagccggaaaacctaccggattgatgggcacggtgagatggtcatcaatgtggatgttgcggtggcaagcgatacaccgcatccggcgcggattggcctgacctgccagctggcgcaggtctcagagcgggtaaactggctcggcctggggccgcaagaaaactatcccgaccgccttactgcagcctgttttgaccgctgggatctgccattgtcagacatgtataccccgtacgtcttcccgagcgaaaacggtctgcgctgcgggacgcgcgaattgaattatggcccacaccagtggcgcggcgacttccagttcaacatcagccgctacagccaacaacaactgatggaaaccagccatcgccatctgctgcacgcggaagaaggcacatggctgaatatcgacggtttccatatggggattggtggcgacgactcctggagcccgtcagtatcggcggaattccagctgagcgccggtcgctaccattaccagttggtctggtgtcaaaaataa

SEQ ID NO: 425 - DNA, 3386 bp, Artificial Sequence
  Description of Artificial Sequence: Synthetic polynucleotide
ggtaccgtcagcataacaccctgacctctcattaattgttcatgccgggcggcactatcgtcgtccggccttttcctctcttactctgctacgtacatctatttctataaatccgttcaatttgtctgttttttgcacaaacatgaaatatcagacaattccgtgacttaagaaaatttatacaaatcagcaatataccccttaaggagtatataaaggtgaatttgatttacatcaataagcggggttgctgaatcgttaaggatccctctagaaataattttgtttaactttaagaaggagatatacatatgactatgattacggattctctggccgtcgtattacaacgtcgtgactgggaaaaccctggcgttacccaacttaatcgccttgcggcacatccccctttcgccagctggcgtaatagcgaagaggcccgcaccgatcgcccttcccaacagttgcgcagcctgaatggcgaatggcgctttgcctggtttccggcaccagaagcggtgccggaaagctggctggagtgcgatcttcctgacgccgatactgtcgtcgtcccctcaaactggcagatgcacggttacgatgcgcctatctacaccaacgtgacctatcccattacggtcaatccgccgtttgttcccgcggagaatccgacaggttgttactcgctcacatttaatattgatgaaagctggctacaggaaggccagacgcgaattatttttgatggcgttaactcggcgtttcatctgtggtgcaacgggcgctgggtcggttacggccaggacagccgtttgccgtctgaatttgacctgagcgcatttttacgcgccggagaaaaccgcctcgcggtgatggtgctgcgctggagtgacggcagttatctggaagatcaggatatgtggcggatgagcggcattttccgtgacgtctcgttgctgcataaaccgaccacgcaaatcagcgatttccaagttaccactctctttaatgatgatttcagccgcgcggtactggaggcagaagttcagatgtacggcgagctgcgcgatgaactgcgggtgacggtttctttgtggcagggtgaaacgcaggtcgccagcggcaccgcgcctttcggcggtgaaattatcgatgagcgtggcggttatgccgatcgcgtcacactacgcctgaacgttgaaaatccggaactgtggagcgccgaaatcccgaatctctatcgtgcagtggttgaactgcacaccgccgacggcacgctgattgaagcagaagcctgcgacgtcggtttccgcgaggtgcggattgaaaatggtctgctgctgctgaacggcaagccgttgctgattcgcggcgttaaccgtcacgagcatcatcctctgcatggtcaggtcatggatgagcagacgatggtgcaggatatcctgctgatgaagcagaacaactttaacgccgtgcgctgttcgcattatccgaaccatccgctgtggtacacgctgtgcgaccgctacggcctgtatgtggtggatgaagccaatattgaaacccacggcatggtgccaatgaatcgtctgaccgatgatccgcgctggctacccgcgatgagcgaacgcgtaacgcggatggtgcagcgcgatcgtaatcacccgagtgtgatcatctggtcgctggggaatgaatcaggccacggcgctaatcacgacgcgctgtatcgctggatcaaatctgtcgatccttcccgcccggtacagtatgaaggcggcggagccgacaccacggccaccgatattatttgcccgatgtacgcgcgcgtggatgaagaccagcccttcccggcggtgccgaaatggtccatcaaaaaatggctttcgctgcctggagaaatgcgcccgctgatcctttgcgaatatgcccacgcgatgggtaacagtcttggcggcttcgctaaatactggcaggcgtttcgtcagtacccccgtttacagggcggcttcgtctgggactgggtggatcagtcgctgattaaatatgatgaaaacggcaacccgtggtcggcttacggcggtgattttggcgatacgccgaacgatcgccagttctgtatgaacggtctggtctttgccgaccgcacgccgcatccggcgctgacggaagcaaaacaccaacagcagtatttccagttccgtttatccgggcgaaccatcgaagtgaccagcgaatacctgttccgtcatagcgataacgagttcctgcactggatggtggcactggatggcaagccgctggcaagcggtgaagtgcctctggatgttggcccgcaaggtaagcagttgattgaactgcctgaactgccgcagccggagagcgccggacaactctggctaacggtacgcgtagtgcaaccaaacgcgaccgcatggtcagaagccggacacatcagcgcctggcagcaatggcgtctggcggaaaacctcagcgtgacactcccctccgcgtcccacgccatccctcaactgaccaccagcggaacggatttttgcatcgagctgggtaataagcgttggcaatttaaccgccagtcaggctttctttcacagatgtggattggcgatgaaaaacaactgctgaccccgctgcgcgatcagttcacccgtgcgccgctggataacgacattggcgtaagtgaagcgacccgcattgaccctaacgcctgggtcgaacgctggaaggcggcgggccattaccaggccgaagcggcgttgttgcagtgcacggcagatacacttgccgacgcggtgctgattacaaccgcccacgcgtggcagcatcaggggaaaaccttatttatcagccggaaaacctaccggattgatgggcacggtgagatggtcatcaatgtggatgttgcggtggcaagcgatacaccgcatccggcgcggattggcctgacctgccagctggcgcaggtctcagagcgggtaaactggctcggcctggggccgcaagaaaactatcccgaccgccttactgcagcctgttttgaccgctgggatctgccattgtcagacatgtataccccgtacgtcttcccgagcgaaaacggtctgcgctgcgggacgcgcgaattgaattatggcccacaccagtggcgcggcgacttccagttcaacatcagccgctacagccaacaacaactgatggaaaccagccatcgccatctgctgcacgcggaagaaggcacatggctgaatatcgacggtttccatatggggattggtggcgacgactcctggagcccgtcagtatcggcggaattccagctgagcgccggtcgctaccattaccagttggtctggtgtcaaaaataa

SEQ ID NO: 426 - DNA, 3261 bp, Artificial Sequence
  Description of Artificial Sequence: Synthetic polynucleotide
ggtacccatttcctctcatcccatccggggtgagagtcttttcccccgacttatggctcatgcatgcatcaaaaaagatgtgagcttgatcaaaaacaaaaaatatttcactcgacaggagtatttatattgcgcccggatccctctagaaataattttgtttaactttaagaaggagatatacatatgactatgattacggattctctggccgtcgtattacaacgtcgtgactgggaaaaccctggcgttacccaacttaatcgccttgcggcacatccccctttcgccagctggcgtaatagcgaagaggcccgcaccgatcgcccttcccaacagttgcgcagcctgaatggcgaatggcgctttgcctggtttccggcaccagaagcggtgccggaaagctggctggagtgcgatcttcctgacgccgatactgtcgtcgtcccctcaaactggcagatgcacggttacgatgcgcctatctacaccaacgtgacctatcccattacggtcaatccgccgtttgttcccgcggagaatccgacaggttgttactcgctcacatttaatattgatgaaagctggctacaggaaggccagacgcgaattatttttgatggcgttaactcggcgtttcatctgtggtgcaacgggcgctgggtcggttacggccaggacagccgtttgccgtctgaatttgacctgagcgcatttttacgcgccggagaaaaccgcctcgcggtgatggtgctgcgctggagtgacggcagttatctggaagatcaggatatgtggcggatgagcggcattttccgtgacgtctcgttgctgcataaaccgaccacgcaaatcagcgatttccaagttaccactctctttaatgatgatttcagccgcgcggtactggaggcagaagttcagatgtacggcgagctgcgcgatgaactgcgggtgacggtttctttgtggcagggtgaaacgcaggtcgccagcggcaccgcgcctttcggcggtgaaattatcgatgagcgtggcggttatgccgatcgcgtcacactacgcctgaacgttgaaaatccggaactgtggagcgccgaaatcccgaatctctatcgtgcagtggttgaactgcacaccgccgacggcacgctgattgaagcagaagcctgcgacgtcggtttccgcgaggtgcggattgaaaatggtctgctgctgctgaacggcaagccgttgctgattcgcggcgttaaccgtcacgagcatcatcctctgcatggtcaggtcatggatgagcagacgatggtgcaggatatcctgctgatgaagcagaacaactttaacgccgtgcgctgttcgcattatccgaaccatccgctgtggtacacgctgtgcgaccgctacggcctgtatgtggtggatgaagccaatattgaaacccacggcatggtgccaatgaatcgtctgaccgatgatccgcgctggctacccgcgatgagcgaacgcgtaacgcggatggtgcagcgcgatcgtaatcacccgagtgtgatcatctggtcgctggggaatgaatcaggccacggcgctaatcacgacgcgctgtatcgctggatcaaatctgtcgatccttcccgcccggtacagtatgaaggcggcggagccgacaccacggccaccgatattatttgcccgatgtacgcgcgcgtggatgaagaccagcccttcccggcggtgccgaaatggtccatcaaaaaatggctttcgctgcctggagaaatgcgcccgctgatcctttgcgaatatgcccacgcgatgggtaacagtcttggcggcttcgctaaatactggcaggcgtttcgtcagtacccccgtttacagggcggcttcgtctgggactgggtggatcagtcgctgattaaatatgatgaaaacggcaacccgtggtcggcttacggcggtgattttggcgatacgccgaacgatcgccagttctgtatgaacggtctggtctttgccgaccgcacgccgcatccggcgctgacggaagcaaaacaccaacagcagtatttccagttccgtttatccgggcgaaccatcgaagtgaccagcgaatacctgttccgtcatagcgataacgagttcctgcactggatggtggcactggatggcaagccgctggcaagcggtgaagtgcctctggatgttggcccgcaaggtaagcagttgattgaactgcctgaactgccgcagccggagagcgccggacaactctggctaacggtacgcgtagtgcaaccaaacgcgaccgcatggtcagaagccggacacatcagcgcctggcagcaatggcgtctggcggaaaacctcagcgtgacactcccctccgcgtcccacgccatccctcaactgaccaccagcggaacggatttttgcatcgagctgggtaataagcgttggcaatttaaccgccagtcaggctttctttcacagatgtggattggcgatgaaaaacaactgctgaccccgctgcgcgatcagttcacccgtgcgccgctggataacgacattggcgtaagtgaagcgacccgcattgaccctaacgcctgggtcgaacgctggaaggcggcgggccattaccaggccgaagcggcgttgttgcagtgcacggcagatacacttgccgacgcggtgctgattacaaccgcccacgcgtggcagcatcaggggaaaaccttatttatcagccggaaaacctaccggattgatgggcacggtgagatggtcatcaatgtggatgttgcggtggcaagcgatacaccgcatccggcgcggattggcctgacctgccagctggcgcaggtctcagagcgggtaaactggctcggcctggggccgcaagaaaactatcccgaccgccttactgcagcctgttttgaccgctgggatctgccattgtcagacatgtataccccgtacgtcttcccgagcgaaaacggtctgcgctgcgggacgcgcgaattgaattatggcccacaccagtggcgcggcgacttccagttcaacatcagccgctacagccaacaacaactgatggaaaccagccatcgccatctgctgcacgcggaagaaggcacatggctgaatatcgacggtttccatatggggattggtggcgacgactcctggagcccgtcagtatcggcggaattccagctgagcgccggtcgctaccattaccagttggtctggtgtcaaaaataa

SEQ ID NO: 427 - DNA, 3279 bp, Artificial Sequence
  Description of Artificial Sequence: Synthetic polynucleotide
ggtaccagttgttcttattggtggtgttgctttatggttgcatcgtagtaaatggttgtaacaaaagcaatttttccggctgtctgtatacaaaaacgccgtaaagtttgagcgaagtcaataaactctctacccattcagggcaatatctctcttggatccctctagaaataattttgtttaactttaagaaggagatatacatatgctatgattacggattctctggccgtcgtattacaacgtcgtgactgggaaaaccctggcgttacccaacttaatcgccttgcggcacatccccctttcgccagctggcgtaatagcgaagaggcccgcaccgatcgcccttcccaacagttgcgcagcctgaatggcgaatggcgctttgcctggtttccggcaccagaagcggtgccggaaagctggctggagtgcgatcttcctgacgccgatactgtcgtcgtcccctcaaactggcagatgcacggttacgatgcgcctatctacaccaacgtgacctatcccattacggtcaatccgccgtttgttcccgcggagaatccgacaggttgttactcgctcacatttaatattgatgaaagctggctacaggaaggccagacgcgaattatttttgatggcgttaactcggcgtttcatctgtggtgcaacgggcgctgggtcggttacggccaggacagccgtttgccgtctgaatttgacctgagcgcatttttacgcgccggagaaaaccgcctcgcggtgatggtgctgcgctggagtgacggcagttatctggaagatcaggatatgtggcggatgagcggcattttccgtgacgtctcgttgctgcataaaccgaccacgcaaatcagcgatttccaagttaccactctctttaatgatgatttcagccgcgcggtactggaggcagaagttcagatgtacggcgagctgcgcgatgaactgcgggtgacggtttctttgtggcagggtgaaacgcaggtcgccagcggcaccgcgcctttcggcggtgaaattatcgatgagcgtggcggttatgccgatcgcgtcacactacgcctgaacgttgaaaatccggaactgtggagcgccgaaatcccgaatctctatcgtgcagtggttgaactgcacaccgccgacggcacgctgattgaagcagaagcctgcgacgtcggtttccgcgaggtgcggattgaaaatggtctgctgctgctgaacggcaagccgttgctgattcgcggcgttaaccgtcacgagcatcatcctctgcatggtcaggtcatggatgagcagacgatggtgcaggatatcctgctgatgaagcagaacaactttaacgccgtgcgctgttcgcattatccgaaccatccgctgtggtacacgctgtgcgaccgctacggcctgtatgtggtggatgaagccaatattgaaacccacggcatggtgccaatgaatcgtctgaccgatgatccgcgctggctacccgcgatgagcgaacgcgtaacgcggatggtgcagcgcgatcgtaatcacccgagtgtgatcatctggtcgctggggaatgaatcaggccacggcgctaatcacgacgcgctgtatcgctggatcaaatctgtcgatccttcccgcccggtacagtatgaaggcggcggagccgacaccacggccaccgatattatttgcccgatgtacgcgcgcgtggatgaagaccagcccttcccggcggtgccgaaatggtccatcaaaaaatggctttcgctgcctggagaaatgcgcccgctgatcctttgcgaatatgcccacgcgatgggtaacagtcttggcggcttcgctaaatactggcaggcgtttcgtcagtacccccgtttacagggcggcttcgtctgggactgggtggatcagtcgctgattaaatatgatgaaaacggcaacccgtggtcggcttacggcggtgattttggcgatacgccgaacgatcgccagttctgtatgaacggtctggtctttgccgaccgcacgccgcatccggcgctgacggaagcaaaacaccaacagcagtatttccagttccgtttatccgggcgaaccatcgaagtgaccagcgaatacctgttccgtcatagcgataacgagttcctgcactggatggtggcactggatggcaagccgctggcaagcggtgaagtgcctctggatgttggcccgcaaggtaagcagttgattgaactgcctgaactgccgcagccggagagcgccggacaactctggctaacggtacgcgtagtgcaaccaaacgcgaccgcatggtcagaagccggacacatcagcgcctggcagcaatggcgtctggcggaaaacctcagcgtgacactcccctccgcgtcccacgccatccctcaactgaccaccagcggaacggatttttgcatcgagctgggtaataagcgttggcaatttaaccgccagtcaggctttctttcacagatgtggattggcgatgaaaaacaactgctgaccccgctgcgcgatcagttcacccgtgcgccgctggataacgacattggcgtaagtgaagcgacccgcattgaccctaacgcctgggtcgaacgctggaaggcggcgggccattaccaggccgaagcggcgttgttgcagtgcacggcagatacacttgccgacgcggtgctgattacaaccgcccacgcgtggcagcatcaggggaaaaccttatttatcagccggaaaacctaccggattgatgggcacggtgagatggtcatcaatgtggatgttgcggtggcaagcgatacaccgcatccggcgcggattggcctgacctgccagctggcgcaggtctcagagcgggtaaactggctcggcctggggccgcaagaaaactatcccgaccgccttactgcagcctgttttgaccgctgggatctgccattgtcagacatgtataccccgtacgtcttcccgagcgaaaacggtctgcgctgcgggacgcgcgaattgaattatggcccacaccagtggcgcggcgacttccagttcaacatcagccgctacagccaacaacaactgatggaaaccagccatcgccatctgctgcacgcggaagaaggcacatggctgaatatcgacggtttccatatggggattggtggcgacgactcctggagcccgtcagtatcggcggaattccagctgagcgccggtcgctaccattaccagttggtctggtgtcaaaaataa

SEQ ID NO: 428 - DNA, 1420 bp, Artificial Sequence
  Description of Artificial Sequence: Synthetic polynucleotide
ttattatcgcaccgcaatcgggattttcgattcataaagcaggtcgtaggtcggcttgttgagcaggtcttgcagcgtgaaaccgtccagatacgtgaaaaacgacttcattgcaccgccgagtatgcccgtcagccggcaggacggcgtaatcaggcattcgttgttcgggcccatacactcgaccagctgcatcggttcgaggtggcggacgaccgcgccgatattgatgcgttcgggcggcgcggccagcctcagcccgccgcctttcccgcgtacgctgtgcaagaacccgcctttgaccagcgcggtaaccactttcatcaaatggcttttggaaatgccgtaggtcgaggcgatggtggcgatattgaccagcgcgtcgtcgttgacggcggtgtagatgaggacgcgcagcccgtagtcggtatgttgggtcagatacatacaacctccttagtacatgcaaaattatttctagagcaacatacgagccggaagcataaagtgtaaagcctggggtgcctaatgagttgagttgaggaattataacaggaagaaatattcctcatacgcttgtaattcctctatggttgttgacaattaatcatcggctcgtataatgtataacattcatattttgtgaattttaaactctagaaataattttgtttaactttaagaaggagatatacatatggctagcaaaggcgaagaattgttcacgggcgttgttcctattttggttgaattggatggcgatgttaatggccataaattcagcgttagcggcgaaggcgaaggcgatgctacgtatggcaaattgacgttgaaattcatttgtacgacgggcaaattgcctgttccttggcctacgttggttacgacgttcagctatggcgttcaatgtttcagccgttatcctgatcatatgaaacgtcatgatttcttcaaaagcgctatgcctgaaggctatgttcaagaacgtacgattagcttcaaagatgatggcaattataaaacgcgtgctgaagttaaattcgaaggcgatacgttggttaatcgtattgaattgaaaggcattgatttcaaagaagatggcaatattttgggccataaattggaatataattataatagccataatgtttatattacggctgataaacaaaaaaatggcattaaagctaatttcaaaattcgtcataatattgaagatggcagcgttcaattggctgatcattatcaacaaaatacgcctattggcgatggccctgttttgttgcctgataatcattatttgagcacgcaaagcgctttgagcaaagatcctaatgaaaaacgtgatcatatggttttgttggaattcgttacggctgctggcattacgcatggcatggatgaattgtataaataataa

SEQ ID NO: 429 - DNA, 60 bp, Artificial Sequence
  Description of Artificial Sequence: Synthetic primer
tagaactgatgcaaaaagtgctcgacgaaggcacacagatgtgtaggctggagctgcttc

SEQ ID NO: 430 - DNA, 60 bp, Artificial Sequence
  Description of Artificial Sequence: Synthetic primer
gtttcgtaattagatagccaccggcgctttaatgcccggacatatgaatatcctccttag

SEQ ID NO: 431 - DNA, 52 bp, Artificial Sequence
  Description of Artificial Sequence: Synthetic primer
caacacgtttcctgaggaaccatgaaacagtatttagaactgatgcaaaaag

SEQ ID NO: 432 - DNA, 46 bp, Artificial Sequence
  Description of Artificial Sequence: Synthetic primer
cgcacactggcgtcggctctggcaggatgtttcgtaattagatagc

SEQ ID NO: 433 - DNA, 36 bp, Artificial Sequence
  Description of Artificial Sequence: Synthetic primer
atatcgtcgcagcccacagcaacacgtttcctgagg

SEQ ID NO: 434 - DNA, 47 bp, Artificial Sequence
  Description of Artificial Sequence: Synthetic primer
aagaatttaacggagggcaaaaaaaaccgacgcacactggcgtcggc

SEQ ID NO: 435-473 - skipped (39 entries)

SEQ ID NO: 474 - DNA, 2555 bp, Artificial Sequence
  Description of Artificial Sequence: Synthetic polynucleotide
actcttcctttttcaatattattgaagcatttatcagggttattgtctcatgagcggatacatatttgaatgtatttagaaaaataaacaaataggggaattaaaaaaaagcccgctcattaggcgggctactacctaggccgcggccgcgcgaattcgagctcggtacccggggatcctctagagtcgacctgcaggcatgcaagcttgcggccgcgtcgtgactgggaaaaccctggcgactagtcttggactcctgttgatagatccagtaatgacctcagaactccatctggatttgttcagaacgctcggttgccgccgggcgttttttattggtgagaatccaggggtccccaataattacgatttaaatcacagcaaacaccacgtcggccctatcagctgcgtgctttctatgagtcgttgctgcataacttgacaattaacatccggctcgtagggtttgtggagggcccaagttcacttaaaaaggagatcaacaatgaaagcaattttcgtactgaaacatcttaatcatgctggggagggtttctaatgttcacgggaagtattgtcgcgattgttactccgatggatgaaaaaggtaatgtctgtcgggctagcttgaaaaaactgattgattatcatgtcgccagcggtacttcggcgatcgtttctgttggcaccactggcgagtccgctaccttaaatcatgacgaacatgctgatgtggtgatgatgacgctggatctggctgatgggcgcattccggtaattgccgggaccggcgctaacgctactgcggaagccattagcctgacgcagcgcttcaatgacagtggtatcgtcggctgcctgacggtaaccccttactacaatcgtccgtcgcaagaaggtttgtatcagcatttcaaagccatcgctgagcatactgacctgccgcaaattctgtataatgtgccgtcccgtactggctgcgatctgctcccggaaacggtgggccgtctggcgaaagtaaaaaatattatcggaatcaaagaggcaacagggaacttaacgcgtgtaaaccagatcaaagagctggtttcagatgattttgttctgctgagcggcgatgatgcgagcgcgctggacttcatgcaattgggcggtcatggggttatttccgttacggctaacgtcgcagcgcgtgatatggcccagatgtgcaaactggcagcagaagggcattttgccgaggcacgcgttattaatcagcgtctgatgccattacacaacaaactatttgtcgaacccaatccaatcccggtgaaatgggcatgtaaggaactgggtcttgtggcgaccgatacgctgcgcctgccaatgacaccaatcaccgacagtggccgtgagacggtcagagcggcgcttaaacatgccggtttgctgtaagacttttgtcaggttcctactgtgacgactaccaccgatagactggagtgttgctgcgaaaaaaccccgccgaagcggggttttttgcgagaagtcaccacgattgtgctttacacggagtagtcggcagttccttaagtcagaatagtggacaggcggccaagaacttcgttcatgatagtctccggaacccgttcgagtcgttttccgccccgtgctttcatatcaattgtccggggttgatcgcaacgtacaacacctgtggtacgtatgccaacaccatccaacgacaccgcaaagccggcagtgcgggcaaaattgcctccgctggttacgggcacaacaacaggcaggcgggtcacgcgattaaaggccgccggtgtgacaatcagcaccggccgcgttccctgctgctcatgacctgcggtaggatcaagcgagacaagccagatttcccctctttccatctagtataactattgtttctctagtaacatttattgtacaacacgagcccatttttgtcaaataaattttaaattatatcaacgttaataagacgttgtcaataaaattattttgacaaaattggccggccggcgcgccgatctgaagatcagcagttcaacctgttgatagtacgtactaagctctcatgtttcacgtactaagctctcatgtttaacgtactaagctctcatgtttaacgaactaaaccctcatggctaacgtactaagctctcatggctaacgtactaagctctcatgtttcacgtactaagctctcatgtttgaacaataaaattaatataaatcagcaacttaaatagcctctaaggttttaagttttataagaaaaaaaagaatatataaggcttttaaagcctttaaggtttaacggttgtggacaacaagccagggatgtaacgcactgagaagcccttagagcctctcaaagcaattttgagtgacacaggaacacttaacggctgacatggggcgcgcccagctgtctagggcggcggatttgtcctactcaggagagcgttcaccgacaaacaacagataaaacgaaaggcccagtctttcgactgagcctttcgttttatttgatgcct

SEQ ID NO: 475 - DNA, 2472 bp, Artificial Sequence
  Description of Artificial Sequence: Synthetic polynucleotide
actcttcctttttcaatattattgaagcatttatcagggttattgtctcatgagcggatacatatttgaatgtatttagaaaaataaacaaataggggaattaaaaaaaagcccgctcattaggcgggctactacctaggccgcggccgcgcgaattcgagctcggtacccggggatcctctagagtcgacctgcaggcatgcaagcttgcggccgcgtcgtgactgggaaaaccctggcgactagtcttggactcctgttgatagatccagtaatgacctcagaactccatctggatttgttcagaacgctcggttgccgccgggcgttttttattggtgagaatccaggggtccccaataattacgatttaaatcacagcaaacaccacgtcggccctatcagctgcgtgctttctatgagtcgttgctgcataacttgacaattaatcatccggctcgtagggtttgtggagggcccaagttcacttaaaaaggagatcaacaatgaaagcaattttcgtactgaaacatcttaatcatgctggggagggtttctaatgaaacagtatttagaactgatgcaaaaagtgctcgacgaaggcacacagaaaaacgaccgtaccggaaccggaacgctttccatttttggtcatcagatgcgttttaacctgcaagatggattcccgctggtgacaactaaacgttgccacctgcgttccatcatccatgaactgctgtggtttcttcagggcgacactaacattgcttatctacacgaaaacaatgtcaccatctgggacgaatgggccgatgaaaacggcgacctcgggccagtgtatggtaaacagtggcgtgcctggccaacgccagatggtcgtcatattgaccagatcactacggtactgaaccagctgaaaaacgacccggattcgcgccgcattattgtttcagcgtggaacgtaggcgaactggataaaatggcgctggcaccgtgccatgcattcttccagttctatgtggcagacggcaaactctcttgccagctttatcagcgctcctgtgacgtcttcctcggcctgccgttcaacattgccagctacgcgttattggtgcatatgatggcgcagcagtgcgatctggaagtgggtgattttgtctggaccggtggcgacacgcatctgtacagcaaccatatggatcaaactcatctgcaattaagccgcgaaccgcgtccgctgccgaagttgattatcaaacgtaaacccgaatccatcttcgactaccgtttcgaagactttgagattgaaggctacgatccgcatccgggcattaaagcgccggtggctatctaagacttttgtcaggttcctactgtgacgactaccaccgatagactggagtgttgctgcgaaaaaaccccgccgaagcggggttttttgcgagaagtcaccacgattgtgctttacacggagtagtcggcagttccttaagtcagaatagtggacaggcggccaagaacttcgttcatgatagtctccggaacccgttcgagtcgttttccgccccgtgctttcatatcaattgtccggggttgatcgcaacgtacaacacctgtggtacgtatgccaacaccatccaacgacaccgcaaagccggcagtgcgggcaaaattgcctccgctggttacgggcacaacaacaggcaggcgggtcacgcgattaaaggccgccggtgtgacaatcagcaccggccgcgttccctgctgctcatgacctgcggtaggatcaagcgagacaagccagatttcccctctttccatctagtataactattgtttctctagtaacatttattgtacaacacgagcccatttttgtcaaataaattttaaattatatcaacgttaataagacgttgtcaataaaattattttgacaaaattggccggccggcgcgccgatctgaagatcagcagttcaacctgttgatagtacgtactaagctctcatgtttcacgtactaagctctcatgtttaacgtactaagctctcatgtttaacgaactaaaccctcatggctaacgtactaagctctcatggctaacgtactaagctctcatgtttcacgtactaagctctcatgtttgaacaataaaattaatataaatcagcaacttaaatagcctctaaggttttaagttttataagaaaaaaaagaatatataaggcttttaaagcctttaaggtttaacggttgtggacaacaagccagggatgtaacgcactgagaagcccttagagcctctcaaagcaattttgagtgacacaggaacacttaacggctgacatggggcgcgcccagctgtctagggcggcggatttgtcctactcaggagagcgttcaccgacaaacaacagataaaacgaaaggcccagtctttcgactgagcctttcgttttatttgatgcct

SEQ ID NO: 476 - DNA, 333 bp, Artificial Sequence
  Description of Artificial Sequence: Synthetic polynucleotide
ttaagtcagaatagtggacaggcggccaagaacttcgttcatgatagtctccggaacccgttcgagtcgttttccgccccgtgctttcatatcaattgtccggggttgatcgcaacgtacaacacctgtggtacgtatgccaacaccatccaacgacaccgcaaagccggcagtgcgggcaaaattgcctccgctggttacgggcacaacaacaggcaggcgggtcacgcgattaaaggccgccggtgtgacaatcagcaccggccgcgttccctgctgctcatgacctgcggtaggatcaagcgagacaagccagatttcccctctttccat

SEQ ID NO: 477 - DNA, 879 bp, Artificial Sequence
  Description of Artificial Sequence: Synthetic polynucleotide
atgttcacgggaagtattgtcgcgattgttactccgatggatgaaaaaggtaatgtctgtcgggctagcttgaaaaaactgattgattatcatgtcgccagcggtacttcggcgatcgtttctgttggcaccactggcgagtccgctaccttaaatcatgacgaacatgctgatgtggtgatgatgacgctggatctggctgatgggcgcattccggtaattgccgggaccggcgctaacgctactgcggaagccattagcctgacgcagcgcttcaatgacagtggtatcgtcggctgcctgacggtaaccccttactacaatcgtccgtcgcaagaaggtttgtatcagcatttcaaagccatcgctgagcatactgacctgccgcaaattctgtataatgtgccgtcccgtactggctgcgatctgctcccggaaacggtgggccgtctggcgaaagtaaaaaatattatcggaatcaaagaggcaacagggaacttaacgcgtgtaaaccagatcaaagagctggtttcagatgattttgttctgctgagcggcgatgatgcgagcgcgctggacttcatgcaattgggcggtcatggggttatttccgttacggctaacgtcgcagcgcgtgatatggcccagatgtgcaaactggcagcagaagggcattttgccgaggcacgcgttattaatcagcgtctgatgccattacacaacaaactatttgtcgaacccaatccaatcccggtgaaatgggcatgtaaggaactgggtcttgtggcgaccgatacgctgcgcctgccaatgacaccaatcaccgacagtggccgtgagacggtcagagcggcgcttaaacatgccggtttgctgtaa

SEQ ID NO: 478 - DNA, 795 bp, Artificial Sequence
  Description of Artificial Sequence: Synthetic polynucleotide
atgaaacagtatttagaactgatgcaaaaagtgctcgacgaaggcacacagaaaaacgaccgtaccggaaccggaacgctttccatttttggtcatcagatgcgttttaacctgcaagatggattcccgctggtgacaactaaacgttgccacctgcgttccatcatccatgaactgctgtggtttcttcagggcgacactaacattgcttatctacacgaaaacaatgtcaccatctgggacgaatgggccgatgaaaacggcgacctcgggccagtgtatggtaaacagtggcgtgcctggccaacgccagatggtcgtcatattgaccagatcactacggtactgaaccagctgaaaaacgacccggattcgcgccgcattattgtttcagcgtggaacgtaggcgaactggataaaatggcgctggcaccgtgccatgcattcttccagttctatgtggcagacggcaaactctcttgccagctttatcagcgctcctgtgacgtcttcctcggcctgccgttcaacattgccagctacgcgttattggtgcatatgatggcgcagcagtgcgatctggaagtgggtgattttgtctggaccggtggcgacacgcatctgtacagcaaccatatggatcaaactcatctgcaattaagccgcgaaccgcgtccgctgccgaagttgattatcaaacgtaaacccgaatccatcttcgactaccgtttcgaagactttgagattgaaggctacgatccgcatccgggcattaaagcgccggtggctatctaa

SEQ ID NO: 479 - protein, 110 aa, Artificial Sequence
  Description of Artificial Sequence: Synthetic polypeptide
MERGEIWLVSLDPTAGHEQQGTRPVLIVTPAAFNRVTRLPVVVPVTSGGNFARTAGFAVSLDGVGIRTTGVVRCDQPRTIDMKARGGKRLERVPETIMNEVLGRLSTILT

SEQ ID NO: 480 - protein, 292 aa, Artificial Sequence
  Description of Artificial Sequence: Synthetic polypeptide
MFTGSIVAIVTPMDEKGNVCRASLKKLIDYHVASGTSAIVSVGTTGESATLNHDEHADVVMMTLDLADGRIPVIAGTGANATAEAISLTQRFNDSGIVGCLTVTPYYNRPSQEGLYQHFKAIAEHTDLPQILYNVPSRTGCDLLPETVGRLAKVKNIIGIKEATGNLTRVNQIKELVSDDFVLLSGDDASALDFMQLGGHGVISVTANVAARDMAQMCKLAAEGHFAEARVINQRLMPLHNKLFVEPNPIPVKWACKELGLVATDTLRLPMTPITDSGRETVRAALKHAGLL

SEQ ID NO: 481 - protein, 264 aa, Artificial Sequence
  Description of Artificial Sequence: Synthetic polypeptide
MKQYLELMQKVLDEGTQKNDRTGTGTLSIFGHQMRFNLQDGFPLVTTKRCHLRSIIHELLWFLQGDTNIAYLHENNVTIWDEWADENGDLGPVYGKQWRAWPTPDGRHIDQITTVLNQLKNDPDSRRIIVSAWNVGELDKMALAPCHAFFQFYVADGKLSCQLYQRSCDVFLGLPFNIASYALLVHMMAQQCDLEVGDFVWTGGDTHLYSNHMDQTHLQLSREPRPLPKLIIKRKPESIFDYRFEDFEIEGYDPHPGIKAPVAI

SEQ ID NO: 482 - DNA, 1490 bp, Artificial Sequence
  Description of Artificial Sequence: Synthetic polynucleotide
ttgacggctagctcagtcctaggtacagtgctagcggatctgctggaacaggtggtgagactcaaggtcatgatggacgtgaacaaaaaaacgaaaattcgccaccgaaacgagctaaatcacaccctggctcaacttcctttgcccgcaaagcgagtgatgtatatggcgcttgctcccattgatagcaaagaacctcttgaacgagggcgagttttcaaaattagggctgaagaccttgcagcgctcgccaaaatcaccccatcgcttgcttatcgacaattaaaagagggtggtaaattacttggtgccagcaaaatttcgctaagaggggatgatatcattgctttagctaaagagcttaacctgctctttactgctaaaaactcccctgaagagttagaccttaacattattgagtggatagcttattcaaatgatgaaggatacttgtctttaaaattcaccagaaccatagaaccatatatctctagccttattgggaaaaaaaataaattcacaacgcaattgttaacggcaagcttacgcttaagtagccagtattcatcttctctttatcaacttatcaggaagcattactctaattttaagaagaaaaattattttattatttccgttgatgagttaaaggaagagttaatagcttatacttttgataaagatggaaatattgagtacaaataccctgactttcctatttttaaaagggatgtgttaaataaagccattgctgaaattaaaaagaaaacagaaatatcgtttgttggcttcactgttcatgaaaaagaaggaagaaaaattagtaagctgaagttcgaatttgtcgttgatgaagatgaattttctggcgataaagatgatgaagctttttttatgaatttatctgaagctgatgcagcttttctcaaggtatttgatgaaaccgtacctcccaaaaaagctaaggggtgaggatctccaggcatcaaataaaacgaaaggctcagtcgaaagactgggcctttcgttttatctgttgtttgtcggtgaacgctctctactagagtcacactggctcaccttcgggtgggcctttctgcgtttatacccgggaaaaagagtattgacttaaagtctaacctataggtataatgtgtggagaccagaggtaaggaggtaacaaccatgcgagtgttgaagaaacatcttaatcatgctaaggaggttttctaatgcataccacccgactgaagagggttggcggctcagttatgctgaccgtcccaccggcactgctgaatgcgctgtctctgggcacagataatgaagttggcatggtcattgataatggccggctgattgttgagccgtacagacgcccgcaatattcactggctgagctactggcacagtgtgatccgaatgctgaaatatcagctgaagaacgagaatggctggatgcaccggcgactggtcaggaggaaatctga

SEQ ID NO: 483 - DNA, 1490 bp, Artificial Sequence
  Description of Artificial Sequence: Synthetic polynucleotide
ttgacggctagctcagtcctaggtacagtgctagcggatcttccggaagactaggtgagactcaaggtcatgatggacgtgaacaaaaaaacgaaaattcgccaccgaaacgagctaaatcacaccctggctcaacttcctttgcccgcaaagcgagtgatgtatatggcgcttgctcccattgatagcaaagaacctcttgaacgagggcgagttttcaaaattagggctgaagaccttgcagcgctcgccaaaatcaccccatcgcttgcttatcgacaattaaaagagggtggtaaattacttggtgccagcaaaatttcgctaagaggggatgatatcattgctttagctaaagagcttaacctgctctttactgctaaaaactcccctgaagagttagaccttaacattattgagtggatagcttattcaaatgatgaaggatacttgtctttaaaattcaccagaaccatagaaccatatatctctagccttattgggaaaaaaaataaattcacaacgcaattgttaacggcaagcttacgcttaagtagccagtattcatcttctctttatcaacttatcaggaagcattactctaattttaagaagaaaaattattttattatttccgttgatgagttaaaggaagagttaatagcttatacttttgataaagatggaaatattgagtacaaataccctgactttcctatttttaaaagggatgtgttaaataaagccattgctgaaattaaaaagaaaacagaaatatcgtttgttggcttcactgttcatgaaaaagaaggaagaaaaattagtaagctgaagttcgaatttgtcgttgatgaagatgaattttctggcgataaagatgatgaagctttttttatgaatttatctgaagctgatgcagcttttctcaaggtatttgatgaaaccgtacctcccaaaaaagctaaggggtgaggatctccaggcatcaaataaaacgaaaggctcagtcgaaagactgggcctttcgttttatctgttgtttgtcggtgaacgctctctactagagtcacactggctcaccttcgggtgggcctttctgcgtttatacccgggaaaaagagtattgacttaaagtctaacctataggtataatgtgtggagaccagaggtaaggaggtaacaaccatgcgagtgttgaagaaacatcttaatcatgctaaggaggttttctaatgcataccacccgactgaagagggttggcggctcagttatgctgaccgtcccaccggcactgctgaatgcgctgtctctgggcacagataatgaagttggcatggtcattgataatggccggctgattgttgagccgtacagacgcccgcaatattcactggctgagctactggcacagtgtgatccgaatgctgaaatatcagctgaagaacgagaatggctggatgcaccggcgactggtcaggaggaaatctga

SEQ ID NO: 484 - DNA, 917 bp, Artificial Sequence
  Description of Artificial Sequence: Synthetic polynucleotide
tgagactcaaggtcatgatggacgtgaacaaaaaaacgaaaattcgccaccgaaacgagctaaatcacaccctggctcaacttcctttgcccgcaaagcgagtgatgtatatggcgcttgctcccattgatagcaaagaacctcttgaacgagggcgagttttcaaaattagggctgaagaccttgcagcgctcgccaaaatcaccccatcgcttgcttatcgacaattaaaagagggtggtaaattacttggtgccagcaaaatttcgctaagaggggatgatatcattgctttagctaaagagcttaacctgctctttactgctaaaaactcccctgaagagttagaccttaacattattgagtggatagcttattcaaatgatgaaggatacttgtctttaaaattcaccagaaccatagaaccatatatctctagccttattgggaaaaaaaataaattcacaacgcaattgttaacggcaagcttacgcttaagtagccagtattcatcttctctttatcaacttatcaggaagcattactctaattttaagaagaaaaattattttattatttccgttgatgagttaaaggaagagttaatagcttatacttttgataaagatggaaatattgagtacaaataccctgactttcctatttttaaaagggatgtgttaaataaagccattgctgaaattaaaaagaaaacagaaatatcgtttgttggcttcactgttcatgaaaaagaaggaagaaaaattagtaagctgaagttcgaatttgtcgttgatgaagatgaattttctggcgataaagatgatgaagctttttttatgaatttatctgaagctgatgcagcttttctcaaggtatttgatgaaaccgtacctcccaaaaaagctaaggggtga

SEQ ID NO: 485 - DNA, 255 bp, Artificial Sequence
  Description of Artificial Sequence: Synthetic polynucleotide
cataccacccgactgaagagggttggcggctcagttatgctgaccgtcccaccggcactgctgaatgcgctgtctctgggcacagataatgaagttggcatggtcattgataatggccggctgattgttgagccgtacagacgcccgcaatattcactggctgagctactggcacagtgtgatccgaatgctgaaatatcagctgaagaacgagaatggctggatgcaccggcgactggtcaggaggaaatctga

SEQ ID NO: 486 - DNA, 14 bp, Artificial Sequence
  Description of Artificial Sequence: Synthetic oligonucleotide
gctggaacaggtgg

SEQ ID NO: 487 - DNA, 14 bp, Artificial Sequence
  Description of Artificial Sequence: Synthetic oligonucleotide
tccggaagactagg

SEQ ID NO: 488 - DNA, 1082 bp, Artificial Sequence
  Description of Artificial Sequence: Synthetic polynucleotide
atggggtacaaaatgaacattagctcgcttcgcaaagcattcatttttatgggggctgttgcagctttaagccttgtcaatgcccagtcagcgcttgccagccccggacaaggcacccaatcagagaatagctgtacacatttccctggtaatcttcctaatatgctgcgtgacctgcgcgatgcgttcagtcgcgttaaaactttttttcaaatgaaagaccagttggataaccttttattaaaagaatcactgttagaggattttaaggggtatctgggatgccaggccctgtccgagatgattcaattttacctggaagaggtaatgccccaagctgagaaccaggacccggacatcaaggcgcacgttaactctttaggggagaatctgaaaaccttacgtctgcgtcttcgtcgctgccatcgcttccttccgtgcgaaaataaatcgaaagccgtggagcaagtcaaaaacgctttcaataagctgcaggagaagggaatttataaggctatgagtgagttcgatattttcattaactacattgaggcttatatgacaatgaagattcgcaatggtggtggttcgggcggtgggtcaccaggtcagggtacgcaatccgaaaactcatgcactcatttcccaggtaacctgccgaacatgctgcgcgacctgcgcgatgcgttttcgcgtgtaaagactttcttccaaatgaaagatcaattagataacctgcttttaaaagagtcgctgcttgaagacttcaaaggctacttaggctgtcaagcccttagtgagatgatccaattttatcttgaggaagtcatgccgcaagcagaaaatcaggacccggatatcaaggcgcacgttaacagccttggtgagaatctgaaaacattacgcttgcgtttacgtcgctgccaccgttttctgccatgcgaaaacaagtcgaaagcagtcgagcaagtaaagaatgcctttaacaagctgcaggagaagggcatttataaagcgatgtcggagttcgatatctttatcaactacattgaagcatacatgacgatgaagatccgcaactg

SEQ ID NO: 489 - DNA, 1046 bp, Artificial Sequence
  Description of Artificial Sequence: Synthetic polynucleotide
atgaaacaatcgaccatcgcattggcgctgcttcctctattgttcacaccggtgacaaaggcaagccccggacaaggcacccaatcagagaatagctgtacacatttccctggtaatcttcctaatatgctgcgtgacctgcgcgatgcgttcagtcgcgttaaaactttttttcaaatgaaagaccagttggataaccttttattaaaagaatcactgttagaggattttaaggggtatctgggatgccaggccctgtccgagatgattcaattttacctggaagaggtaatgccccaagctgagaaccaggacccggacatcaaggcgcacgttaactctttaggggagaatctgaaaaccttacgtctgcgtcttcgtcgctgccatcgcttccttccgtgcgaaaataaatcgaaagccgtggagcaagtcaaaaacgctttcaataagctgcaggagaagggaatttataaggctatgagtgagttcgatattttcattaactacattgaggcttatatgacaatgaagattcgcaatggtggtggttcgggcggtgggtcaccaggtcagggtacgcaatccgaaaactcatgcactcatttcccaggtaacctgccgaacatgctgcgcgacctgcgcgatgcgttttcgcgtgtaaagactttcttccaaatgaaagatcaattagataacctgcttttaaaagagtcgctgcttgaagacttcaaaggctacttaggctgtcaagcccttagtgagatgatccaattttatcttgaggaagtcatgccgcaagcagaaaatcaggacccggatatcaaggcgcacgttaacagccttggtgagaatctgaaaacattacgcttgcgtttacgtcgctgccaccgttttctgccatgcgaaaacaagtcgaaagcagtcgagcaagtaaagaatgcctttaacaagctgcaggagaagggcatttataaagcgatgtcggagttcgatatctttatcaactacattgaagcatacatgacgatgaagatccgcaactg

SEQ ID NO: 490 - DNA, 60 bp, Artificial Sequence
  Description of Artificial Sequence: Synthetic oligonucleotide
aaacaatcgaccatcgcattggcgctgcttcctctattgttcacaccggtgacaaaggca

SEQ ID NO: 491 - DNA, 99 bp, Artificial Sequence
  Description of Artificial Sequence: Synthetic oligonucleotide
atggggtacaaaatgaacattagctcgcttcgcaaagcattcatttttatgggggctgttgcagctttaagccttgtcaatgcccagtcagcgcttgcc

SEQ ID NO: 492 - DNA, 981 bp, Artificial Sequence
  Description of Artificial Sequence: Synthetic polynucleotide
agccccggacaaggcacccaatcagagaatagctgtacacatttccctggtaatcttcctaatatgctgcgtgacctgcgcgatgcgttcagtcgcgttaaaactttttttcaaatgaaagaccagttggataaccttttattaaaagaatcactgttagaggattttaaggggtatctgggatgccaggccctgtccgagatgattcaattttacctggaagaggtaatgccccaagctgagaaccaggacccggacatcaaggcgcacgttaactctttaggggagaatctgaaaaccttacgtctgcgtcttcgtcgctgccatcgcttccttccgtgcgaaaataaatcgaaagccgtggagcaagtcaaaaacgctttcaataagctgcaggagaagggaatttataaggctatgagtgagttcgatattttcattaactacattgaggcttatatgacaatgaagattcgcaatggtggtggttcgggcggtgggtcaccaggtcagggtacgcaatccgaaaactcatgcactcatttcccaggtaacctgccgaacatgctgcgcgacctgcgcgatgcgttttcgcgtgtaaagactttcttccaaatgaaagatcaattagataacctgcttttaaaagagtcgctgcttgaagacttcaaaggctacttaggctgtcaagcccttagtgagatgatccaattttatcttgaggaagtcatgccgcaagcagaaaatcaggacccggatatcaaggcgcacgttaacagccttggtgagaatctgaaaacattacgcttgcgtttacgtcgctgccaccgttttctgccatgcgaaaacaagtcgaaagcagtcgagcaagtaaagaatgcctttaacaagctgcaggagaagggcatttataaagcgatgtcggagttcgatatctttatcaactacattgaagcatacatgacgatgaagatccgcaac

SEQ ID NO: 493 - DNA, 480 bp, Homo sapiens
tcaccaggtcagggtacgcaatccgaaaactcatgcactcatttcccaggtaacctgccgaacatgctgcgcgacctgcgcgatgcgttttcgcgtgtaaagactttcttccaaatgaaagatcaattagataacctgcttttaaaagagtcgctgcttgaagacttcaaaggctacttaggctgtcaagcccttagtgagatgatccaattttatcttgaggaagtcatgccgcaagcagaaaatcaggacccggatatcaaggcgcacgttaacagccttggtgagaatctgaaaacattacgcttgcgtttacgtcgctgccaccgttttctgccatgcgaaaacaagtcgaaagcagtcgagcaagtaaagaatgcctttaacaagctgcaggagaagggcatttataaagcgatgtcggagttcgatatctttatcaactacattgaagcatacatgacgatgaagatccgcaac

SEQ ID NO: 494 - DNA, 21 bp, Artificial Sequence
  Description of Artificial Sequence: Synthetic oligonucleotide
ggtggtggttcgggcggtggg

SEQ ID NO: 495 - protein, 360 aa, Artificial Sequence
  Description of Artificial Sequence: Synthetic polypeptide
MGYKMNISSLRKAFIFMGAVAALSLVNAQSALASPGQGTQSENSCTHFPGNLPNMLRDLRDAFSRVKTFFQMKDQLDNLLLKESLLEDFKGYLGCQALSEMIQFYLEEVMPQAENQDPDIKAHVNSLGENLKTLRLRLRRCHRFLPCENKSKAVEQVKNAFNKLQEKGIYKAMSEFDIFINYIEAYMTMKIRNGGGSGGGSPGQGTQSENSCTHFPGNLPNMLRDLRDAFSRVKTFFQMKDQLDNLLLKESLLEDFKGYLGCQALSEMIQFYLEEVMPQAENQDPDIKAHVNSLGENLKTLRLRLRRCHRFLPCENKSKAVEQVKNAFNKLQEKGIYKAMSEFDIFINYIEAYMTMKIRN

SEQ ID NO: 496 - protein, 348 aa, Artificial Sequence
  Description of Artificial Sequence: Synthetic polypeptide
MKQSTIALALLPLLFTPVTKASPGQGTQSENSCTHFPGNLPNMLRDLRDAFSRVKTFFQMKDQLDNLLLKESLLEDFKGYLGCQALSEMIQFYLEEVMPQAENQDPDIKAHVNSLGENLKTLRLRLRRCHRFLPCENKSKAVEQVKNAFNKLQEKGIYKAMSEFDIFINYIEAYMTMKIRNGGGSGGGSPGQGTQSENSCTHFPGNLPNMLRDLRDAFSRVKTFFQMKDQLDNLLLKESLLEDFKGYLGCQALSEMIQFYLEEVMPQAENQDPDIKAHVNSLGENLKTLRLRLRRCHRFLPCENKSKAVEQVKNAFNKLQEKGIYKAMSEFDIFINYIEAYMTMKIRN

SEQ ID NO: 497 - protein, 160 aa, Homo sapiens
SPGQGTQSENSCTHFPGNLPNMLRDLRDAFSRVKTFFQMKDQLDNLLLKESLLEDFKGYLGCQALSEMIQFYLEEVMPQAENQDPDIKAHVNSLGENLKTLRLRLRRCHRFLPCENKSKAVEQVKNAFNKLQEKGIYKAMSEFDIFINYIEAYMTMKIRN

SEQ ID NO: 498 - protein, 8 aa, Artificial Sequence
  Description of Artificial Sequence: Synthetic peptide
GGGSGGGS

SEQ ID NO: 499 - protein, 243 aa, Artificial Sequence
  Description of Artificial Sequence: Synthetic polypeptide
ICSPPTTPPPPSCHPRLSLHRPALEDLLLGSEANLTCTLTGLRDASGVTFTWTPSSGKSAVQGPPERDLCGCYSVSSVLPGCAEPWNHGKTFTCTAAYPESKTPLTATLSKSGNTFRPEVHLLPPPSEELALNELVTLTCLARGFSPKDVLVRWLQGSQELPREKYLTWASRQEPSQGTTTFAVTSILRVAAEDWKKGDTFSCMVGHEALPLAFTQKTIDRLAGKPTHVNVSVVMAEVDGTCY

SEQ ID NO: 500 - protein, 11 aa, Artificial Sequence
  Description of Artificial Sequence: Synthetic peptide
ICSPPTTPPPP

SEQ ID NO: 501 - protein, 340 aa, Artificial Sequence
  Description of Artificial Sequence: Synthetic polypeptide
MGYKMNISSLRKAFIFMGAVAALSLVNAQSALAHADGSFSDEMNTILDNLAARDFINWLIQTKITDGGGGSGGGGSGGGGSGGGGSICSPPTTPPPPSCQPSLSLQRPALEDLLLGSDASITCTLNGLRDPEGAVFTWEPSTGKDAVQKKAVQNSCGCYSVSSVLPGCAERWNSGASFKCTVTHPESDTLTGTIAKVTVNTFPPQVHLLPPPSEELALNELVSLTCLVRAFNPKEVLVRWLHGNEELSPESYLVFEPLKEPGEGATTYLVTSVLRVSAEIWKQGDQYSCMVGHEALPMNFTQKTIDRLSGKPTNVSVSVIMSEGDGICYGCGHHHHHHHH

SEQ ID NO: 502 - protein, 329 aa, Artificial Sequence
  Description of Artificial Sequence: Synthetic polypeptide
MGYKMNISSLRKAFIFMGAVAALSLVNAQSALAHADGSFSDEMNTILDNLAARDFINWLIQTKITDGGGGSGGGGSGGGGSGGGGSICSPPTTPPPPSCQPSLSLQRPALEDLLLGSDASITCTLNGLRDPEGAVFTWEPSTGKDAVQKKAVQNSCGCYSVSSVLPGCAERWNSGASFKCTVTHPESDTLTGTIAKVTVNTFPPQVHLLPPPSEELALNELVSLTCLVRAFNPKEVLVRWLHGNEELSPESYLVFEPLKEPGEGATTYLVTSVLRVSAEIWKQGDQYSCMVGHEALPMNFTQKTIDRLSGKPTNVSVSVIMSEGDGICY

SEQ ID NO: 503 - protein, 328 aa, Artificial Sequence
  Description of Artificial Sequence: Synthetic polypeptide
MKQSTIALALLPLLFTPVTKAHADGSFSDEMNTILDNLAARDFINWLIQTKITDGGGGSGGGGSGGGGSGGGGSICSPPTTPPPPSCQPSLSLQRPALEDLLLGSDASITCTLNGLRDPEGAVFTWEPSTGKDAVQKKAVQNSCGCYSVSSVLPGCAERWNSGASFKCTVTHPESDTLTGTIAKVTVNTFPPQVHLLPPPSEELALNELVSLTCLVRAFNPKEVLVRWLHGNEELSPESYLVFEPLKEPGEGATTYLVTSVLRVSAEIWKQGDQYSCMVGHEALPMNFTQKTIDRLSGKPTNVSVSVIMSEGDGICYGCGHHHHHHHH

SEQ ID NO: 504 - protein, 317 aa, Artificial Sequence
  Description of Artificial Sequence: Synthetic polypeptide
MKQSTIALALLPLLFTPVTKAHADGSFSDEMNTILDNLAARDFINWLIQTKITDGGGGSGGGGSGGGGSGGGGSICSPPTTPPPPSCQPSLSLQRPALEDLLLGSDASITCTLNGLRDPEGAVFTWEPSTGKDAVQKKAVQNSCGCYSVSSVLPGCAERWNSGASFKCTVTHPESDTLTGTIAKVTVNTFPPQVHLLPPPSEELALNELVSLTCLVRAFNPKEVLVRWLHGNEELSPESYLVFEPLKEPGEGATTYLVTSVLRVSAEIWKQGDQYSCMVGHEALPMNFTQKTIDRLSGKPTNVSVSVIMSEGDGICY

SEQ ID NO: 505 - protein, 328 aa, Artificial Sequence
  Description of Artificial Sequence: Synthetic polypeptide
MKQSTIALALLPLLFTPVTKAHGDGSFSDEMNTILDNLAARDFINWLIQTKITDGGGGSGGGGSGGGGSGGGGSICSPPTTPPPPSCQPSLSLQRPALEDLLLGSDASITCTLNGLRDPEGAVFTWEPSTGKDAVQKKAVQNSCGCYSVSSVLPGCAERWNSGASFKCTVTHPESDTLTGTIAKVTVNTFPPQVHLLPPPSEELALNELVSLTCLVRAFNPKEVLVRWLHGNEELSPESYLVFEPLKEPGEGATTYLVTSVLRVSAEIWKQGDQYSCMVGHEALPMNFTQKTIDRLSGKPTNVSVSVIMSEGDGICYGSGHHHHHHHH

SEQ ID NO: 506 - protein, 317 aa, Artificial Sequence
  Description of Artificial Sequence: Synthetic polypeptide
MKQSTIALALLPLLFTPVTKAHGDGSFSDEMNTILDNLAARDFINWLIQTKITDGGGGSGGGGSGGGGSGGGGSICSPPTTPPPPSCQPSLSLQRPALEDLLLGSDASITCTLNGLRDPEGAVFTWEPSTGKDAVQKKAVQNSCGCYSVSSVLPGCAERWNSGASFKCTVTHPESDTLTGTIAKVTVNTFPPQVHLLPPPSEELALNELVSLTCLVRAFNPKEVLVRWLHGNEELSPESYLVFEPLKEPGEGATTYLVTSVLRVSAEIWKQGDQYSCMVGHEALPMNFTQKTIDRLSGKPTNVSVSVIMSEGDGICY

SEQ ID NO: 507 - protein, 340 aa, Artificial Sequence
  Description of Artificial Sequence: Synthetic polypeptide
MGYKMNISSLRKAFIFMGAVAALSLVNAQSALAHGDGSFSDEMNTILDNLAARDFINWLIQTKITDGGGGSGGGGSGGGGSGGGGSICSPPTTPPPPSCQPSLSLQRPALEDLLLGSDASITCTLNGLRDPEGAVFTWEPSTGKDAVQKKAVQNSCGCYSVSSVLPGCAERWNSGASFKCTVTHPESDTLTGTIAKVTVNTFPPQVHLLPPPSEELALNELVSLTCLVRAFNPKEVLVRWLHGNEELSPESYLVFEPLKEPGEGATTYLVTSVLRVSAEIWKQGDQYSCMVGHEALPMNFTQKTIDRLSGKPTNVSVSVIMSEGDGICYGSGHHHHHHHH

SEQ ID NO: 508 - protein, 329 aa, Artificial Sequence
  Description of Artificial Sequence: Synthetic polypeptide
MGYKMNISSLRKAFIFMGAVAALSLVNAQSALAHGDGSFSDEMNTILDNLAARDFINWLIQTKITDGGGGSGGGGSGGGGSGGGGSICSPPTTPPPPSCQPSLSLQRPALEDLLLGSDASITCTLNGLRDPEGAVFTWEPSTGKDAVQKKAVQNSCGCYSVSSVLPGCAERWNSGASFKCTVTHPESDTLTGTIAKVTVNTFPPQVHLLPPPSEELALNELVSLTCLVRAFNPKEVLVRWLHGNEELSPESYLVFEPLKEPGEGATTYLVTSVLRVSAEIWKQGDQYSCMVGHEALPMNFTQKTIDRLSGKPTNVSVSVIMSEGDGICY

SEQ ID NO: 509 - protein, 20 aa, Artificial Sequence
  Description of Artificial Sequence: Synthetic peptide
GGGGSGGGGSGGGGSGGGGS

SEQ ID NO: 510 - protein, 243 aa, Artificial Sequence
  Description of Artificial Sequence: Synthetic polypeptide
ICSPPTTPPPPSCQPSLSLQRPALEDLLLGSDASITCTLNGLRDPEGAVFTWEPSTGKDAVQKKAVQNSCGCYSVSSVLPGCAERWNSGASFKCTVTHPESDTLTGTIAKVTVNTFPPQVHLLPPPSEELALNELVSLTCLVRAFNPKEVLVRWLHGNEELSPESYLVFEPLKEPGEGATTYLVTSVLRVSAEIWKQGDQYSCMVGHEALPMNFTQKTIDRLSGKPTNVSVSVIMSEGDGICY

SEQ ID NO: 511 - protein, 329 aa, Artificial Sequence
  Description of Artificial Sequence: Synthetic polypeptide
MKQSTIALALLPLLFTPVTKAHADGSFSDEMNTILDNLAARDFINWLIQTKITDGGGGSGGGGSGGGGSGGGGSTICSPPTTPPPPSCHPRLSLHRPALEDLLLGSEANLTCTLTGLRDASGVTFTWTPSSGKSAVQGPPERDLCGCYSVSSVLPGCAEPWNHGKTFTCTAAYPESKTPLTATLSKSGNTFRPEVHLLPPPSEELALNELVTLTCLARGFSPKDVLVRWLQGSQELPREKYLTWASRQEPSQGTTTFAVTSILRVAAEDWKKGDTFSCMVGHEALPLAFTQKTIDRLAGKPTHVNVSVVMAEVDGTCYGSGHHHHHHHH

SEQ ID NO: 512 - protein, 318 aa, Artificial Sequence
  Description of Artificial Sequence: Synthetic polypeptide
MKQSTIALALLPLLFTPVTKAHADGSFSDEMNTILDNLAARDFINWLIQTKITDGGGGSGGGGSGGGGSGGGGSTICSPPTTPPPPSCHPRLSLHRPALEDLLLGSEANLTCTLTGLRDASGVTFTWTPSSGKSAVQGPPERDLCGCYSVSSVLPGCAEPWNHGKTFTCTAAYPESKTPLTATLSKSGNTFRPEVHLLPPPSEELALNELVTLTCLARGFSPKDVLVRWLQGSQELPREKYLTWASRQEPSQGTTTFAVTSILRVAAEDWKKGDTFSCMVGHEALPLAFTQKTIDRLAGKPTHVNVSVVMAEVDGTCY

SEQ ID NO: 513 - protein, 341 aa, Artificial Sequence
  Description of Artificial Sequence: Synthetic polypeptide
MGYKMNISSLRKAFIFMGAVAALSLVNAQSALAHADGSFSDEMNTILDNLAARDFINWLIQTKITDGGGGSGGGGSGGGGSGGGGSTICSPPTTPPPPSCHPRLSLHRPALEDLLLGSEANLTCTLTGLRDASGVTFTWTPSSGKSAVQGPPERDLCGCYSVSSVLPGCAEPWNHGKTFTCTAAYPESKTPLTATLSKSGNTFRPEVHLLPPPSEELALNELVTLTCLARGFSPKDVLVRWLQGSQELPREKYLTWASRQEPSQGTTTFAVTSILRVAAEDWKKGDTFSCMVGHEALPLAFTQKTIDRLAGKPTHVNVSVVMAEVDGTCYGSGHHHHHHHH

SEQ ID NO: 514 - protein, 330 aa, Artificial Sequence
  Description of Artificial Sequence: Synthetic polypeptide
MGYKMNISSLRKAFIFMGAVAALSLVNAQSALAHADGSFSDEMNTILDNLAARDFINWLIQTKITDGGGGSGGGGSGGGGSGGGGSTICSPPTTPPPPSCHPRLSLHRPALEDLLLGSEANLTCTLTGLRDASGVTFTWTPSSGKSAVQGPPERDLCGCYSVSSVLPGCAEPWNHGKTFTCTAAYPESKTPLTATLSKSGNTFRPEVHLLPPPSEELALNELVTLTCLARGFSPKDVLVRWLQGSQELPREKYLTWASRQEPSQGTTTFAVTSILRVAAEDWKKGDTFSCMVGHEALPLAFTQKTIDRLAGKPTHVNVSVVMAEVDGTCY

SEQ ID NO: 515 - DNA, 1020 bp, Artificial Sequence
  Description of Artificial Sequence: Synthetic polynucleotide
atggggtacaaaatgaacattagctcgcttcgcaaagcattcatttttatgggggctgttgcagctttaagccttgtcaatgcccagtcagcgcttgcccatgcggatggcagtttcagtgatgaaatgaacacgattttggataatttagcagccagggatttcataaactggttaattcaaactaaaataacggatggagggggtggttcgggcggcggtggcagtggaggcggtgggtctggcgggggtggatctatctgtagccccccgactacgcccccaccgccttcgtgtcagccttcgttgagcttacagcgccctgcattggaagacttattactggggagcgatgctagcatcacatgcacactgaatgggctgcgcgatccagaaggtgccgttttcacgtgggaaccaagcacgggcaaagacgccgtgcaaaagaaggcggtgcagaatagttgtggctgttacagtgtttcttccgttcttccgggttgcgctgaacgctggaactcgggggcgtctttcaaatgtactgtaacgcacccggaatctgacacacttactggaaccattgcgaaagtcacagtcaacacatttccccctcaagtacatctgcttcctcccccatcagaagagttagccctgaacgagttagtcagcctgacatgtcttgtccgcgcattcaatccgaaggaggtccttgtgcgctggttacacggcaatgaggagttatccccagagtcctatcttgtatttgaaccgcttaaagagccgggtgaaggcgcaaccacgtacttagttacgtcggtgcttcgcgtctcagccgaaatctggaagcagggcgaccagtacagctgtatggtcggccacgaagcccttccaatgaacttcactcaaaagacgatcgaccgcctgagtggtaagccaactaacgtcagcgtttccgtcattatgtcggagggggacggtatttgttacggatccggtcatcaccaccatcaccatcaccat

SEQ ID NO: 516 - DNA, 987 bp, Artificial Sequence
  Description of Artificial Sequence: Synthetic polynucleotide
atggggtacaaaatgaacattagctcgcttcgcaaagcattcatttttatgggggctgttgcagctttaagccttgtcaatgcccagtcagcgcttgcccatgcggatggcagtttcagtgatgaaatgaacacgattttggataatttagcagccagggatttcataaactggttaattcaaactaaaataacggatggagggggtggttcgggcggcggtggcagtggaggcggtgggtctggcgggggtggatctatctgtagccccccgactacgcccccaccgccttcgtgtcagccttcgttgagcttacagcgccctgcattggaagacttattactggggagcgatgctagcatcacatgcacactgaatgggctgcgcgatccagaaggtgccgttttcacgtgggaaccaagcacgggcaaagacgccgtgcaaaagaaggcggtgcagaatagttgtggctgttacagtgtttcttccgttcttccgggttgcgctgaacgctggaactcgggggcgtctttcaaatgtactgtaacgcacccggaatctgacacacttactggaaccattgcgaaagtcacagtcaacacatttccccctcaagtacatctgcttcctcccccatcagaagagttagccctgaacgagttagtcagcctgacatgtcttgtccgcgcattcaatccgaaggaggtccttgtgcgctggttacacggcaatgaggagttatccccagagtcctatcttgtatttgaaccgcttaaagagccgggtgaaggcgcaaccacgtacttagttacgtcggtgcttcgcgtctcagccgaaatctggaagcagggcgaccagtacagctgtatggtcggccacgaagcccttccaatgaacttcactcaaaagacgatcgaccgcctgagtggtaagccaactaacgtcagcgtttccgtcattatgtcggagggggacggtatttgttac

SEQ ID NO: 517 - DNA, 983 bp, Artificial Sequence
  Description of Artificial Sequence: Synthetic polynucleotide
aaacaatcgaccatcgcattggcgctgcttcctctattgttcacaccggtgacaaaggcacatgcggatggcagtttcagtgatgaaatgaacacgattttggataatttagcagccagggatttcataaactggttaattcaaactaaaataacggatggagggggtggttcgggcggcggtggcagtggaggcggtgggtctggcgggggtggatctatctgtagccccccgactacgcccccaccgccttcgtgtcagccttcgttgagcttacagcgccctgcattggaagacttattactggggagcgatgctagcatcacatgcacactgaatgggctgcgcgatccagaaggtgccgttttcacgtgggaaccaagcacgggcaaagacgccgtgcaaaagaaggcggtgcagaatagttgtggctgttacagtgtttcttccgttcttccgggttgcgctgaacgctggaactcgggggcgtctttcaaatgtactgtaacgcacccggaatctgacacacttactggaaccattgcgaaagtcacagtcaacacatttccccctcaagtacatctgcttcctcccccatcagaagagttagccctgaacgagttagtcagcctgacatgtcttgtccgcgcattcaatccgaaggaggtccttgtgcgctggttacacggcaatgaggagttatccccagagtcctatcttgtatttgaaccgcttaaagagccgggtgaaggcgcaaccacgtacttagttacgtcggtgcttcgcgtctcagccgaaatctggaagcagggcgaccagtacagctgtatggtcggccacgaagcccttccaatgaacttcactcaaaagacgatcgaccgcctgagtggtaagccaactaacgtcagcgtttccgtcattatgtcggagggggacggtatttgttacggatccggtcatcaccaccatcaccatcaccattg

SEQ ID NO: 518 - DNA, 948 bp, Artificial Sequence
  Description of Artificial Sequence: Synthetic polynucleotide
aaacaatcgaccatcgcattggcgctgcttcctctattgttcacaccggtgacaaaggcacatgcggatggcagtttcagtgatgaaatgaacacgattttggataatttagcagccagggatttcataaactggttaattcaaactaaaataacggatggagggggtggttcgggcggcggtggcagtggaggcggtgggtctggcgggggtggatctatctgtagccccccgactacgcccccaccgccttcgtgtcagccttcgttgagcttacagcgccctgcattggaagacttattactggggagcgatgctagcatcacatgcacactgaatgggctgcgcgatccagaaggtgccgttttcacgtgggaaccaagcacgggcaaagacgccgtgcaaaagaaggcggtgcagaatagttgtggctgttacagtgtttcttccgttcttccgggttgcgctgaacgctggaactcgggggcgtctttcaaatgtactgtaacgcacccggaatctgacacacttactggaaccattgcgaaagtcacagtcaacacatttccccctcaagtacatctgcttcctcccccatcagaagagttagccctgaacgagttagtcagcctgacatgtcttgtccgcgcattcaatccgaaggaggtccttgtgcgctggttacacggcaatgaggagttatccccagagtcctatcttgtatttgaaccgcttaaagagccgggtgaaggcgcaaccacgtacttagttacgtcggtgcttcgcgtctcagccgaaatctggaagcagggcgaccagtacagctgtatggtcggccacgaagcccttccaatgaacttcactcaaaagacgatcgaccgcctgagtggtaagccaactaacgtcagcgtttccgtcattatgtcggagggggacggtatttgttac

SEQ ID NO: 519 - DNA, 984 bp, Artificial Sequence
  Description of Artificial Sequence: Synthetic polynucleotide
atgaaacaatcgaccatcgcattggcgctgcttcctctattgttcacaccggtgacaaaggcacatggtgatggcagtttcagtgatgaaatgaacacgattttggataatttagcagccagggatttcataaactggttaattcaaactaaaataacggatggagggggtggttcgggcggcggtggcagtggaggcggtgggtctggcgggggtggatctatctgtagccccccgactacgcccccaccgccttcgtgtcagccttcgttgagcttacagcgccctgcattggaagacttattactggggagcgatgctagcatcacatgcacactgaatgggctgcgcgatccagaaggtgccgttttcacgtgggaaccaagcacgggcaaagacgccgtgcaaaagaaggcggtgcagaatagttgtggctgttacagtgtttcttccgttcttccgggttgcgctgaacgctggaactcgggggcgtctttcaaatgtactgtaacgcacccggaatctgacacacttactggaaccattgcgaaagtcacagtcaacacatttccccctcaagtacatctgcttcctcccccatcagaagagttagccctgaacgagttagtcagcctgacatgtcttgtccgcgcattcaatccgaaggaggtccttgtgcgctggttacacggcaatgaggagttatccccagagtcctatcttgtatttgaaccgcttaaagagccgggtgaaggcgcaaccacgtacttagttacgtcggtgcttcgcgtctcagccgaaatctggaagcagggcgaccagtacagctgtatggtcggccacgaagcccttccaatgaacttcactcaaaagacgatcgaccgcctgagtggtaagccaactaacgtcagcgtttccgtcattatgtcggagggggacggtatttgttacggatccggtcatcaccaccatcaccatcaccat

SEQ ID NO: 520 - DNA, 951 bp, Artificial Sequence
  Description of Artificial Sequence: Synthetic polynucleotide
atgaaacaatcgaccatcgcattggcgctgcttcctctattgttcacaccggtgacaaaggcacatggtgatggcagtttcagtgatgaaatgaacacgattttggataatttagcagccagggatttcataaactggttaattcaaactaaaataacggatggagggggtggttcgggcggcggtggcagtggaggcggtgggtctggcgggggtggatctatctgtagccccccgactacgcccccaccgccttcgtgtcagccttcgttgagcttacagcgccctgcattggaagacttattactggggagcgatgctagcatcacatgcacactgaatgggctgcgcgatccagaaggtgccgttttcacgtgggaaccaagcacgggcaaagacgccgtgcaaaagaaggcggtgcagaatagttgtggctgttacagtgtttcttccgttcttccgggttgcgctgaacgctggaactcgggggcgtctttcaaatgtactgtaacgcacccggaatctgacacacttactggaaccattgcgaaagtcacagtcaacacatttccccctcaagtacatctgcttcctcccccatcagaagagttagccctgaacgagttagtcagcctgacatgtcttgtccgcgcattcaatccgaaggaggtccttgtgcgctggttacacggcaatgaggagttatccccagagtcctatcttgtatttgaaccgcttaaagagccgggtgaaggcgcaaccacgtacttagttacgtcggtgcttcgcgtctcagccgaaatctggaagcagggcgaccagtacagctgtatggtcggccacgaagcccttccaatgaacttcactcaaaagacgatcgaccgcctgagtggtaagccaactaacgtcagcgtttccgtcattatgtcggagggggacggtatttgttac

SEQ ID NO: 521 - DNA, 1020 bp, Artificial Sequence
  Description of Artificial Sequence: Synthetic polynucleotide
atggggtacaaaatgaacattagctcgcttcgcaaagcattcatttttatgggggctgttgcagctttaagccttgtcaatgcccagtcagcgcttgcccatggtgatggcagtttcagtgatgaaatgaacacgattttggataatttagcagccagggatttcataaactggttaattcaaactaaaataacggatggagggggtggttcgggcggcggtggcagtggaggcggtgggtctggcgggggtggatctatctgtagccccccgactacgcccccaccgccttcgtgtcagccttcgttgagcttacagcgccctgcattggaagacttattactggggagcgatgctagcatcacatgcacactgaatgggctgcgcgatccagaaggtgccgttttcacgtgggaaccaagcacgggcaaagacgccgtgcaaaagaaggcggtgcagaatagttgtggctgttacagtgtttcttccgttcttccgggttgcgctgaacgctggaactcgggggcgtctttcaaatgtactgtaacgcacccggaatctgacacacttactggaaccattgcgaaagtcacagtcaacacatttccccctcaagtacatctgcttcctcccccatcagaagagttagccctgaacgagttagtcagcctgacatgtcttgtccgcgcattcaatccgaaggaggtccttgtgcgctggttacacggcaatgaggagttatccccagagtcctatcttgtatttgaaccgcttaaagagccgggtgaaggcgcaaccacgtacttagttacgtcggtgcttcgcgtctcagccgaaatctggaagcagggcgaccagtacagctgtatggtcggccacgaagcccttccaatgaacttcactcaaaagacgatcgaccgcctgagtggtaagccaactaacgtcagcgtttccgtcattatgtcggagggggacggtatttgttacggatccggtcatcaccaccatcaccatcaccat

SEQ ID NO: 522 - DNA, 987 bp, Artificial Sequence
  Description of Artificial Sequence: Synthetic polynucleotide
atggggtacaaaatgaacattagctcgcttcgcaaagcattcatttttatgggggctgttgcagctttaagccttgtcaatgcccagtcagcgcttgcccatggtgatggcagtttcagtgatgaaatgaacacgattttggataatttagcagccagggatttcataaactggttaattcaaactaaaataacggatggagggggtggttcgggcggcggtggcagtggaggcggtgggtctggcgggggtggatctatctgtagccccccgactacgcccccaccgccttcgtgtcagccttcgttgagcttacagcgccctgcattggaagacttattactggggagcgatgctagcatcacatgcacactgaatgggctgcgcgatccagaaggtgccgttttcacgtgggaaccaagcacgggcaaagacgccgtgcaaaagaaggcggtgcagaatagttgtggctgttacagtgtttcttccgttcttccgggttgcgctgaacgctggaactcgggggcgtctttcaaatgtactgtaacgcacccggaatctgacacacttactggaaccattgcgaaagtcacagtcaacacatttccccctcaagtacatctgcttcctcccccatcagaagagttagccctgaacgagttagtcagcctgacatgtcttgtccgcgcattcaatccgaaggaggtccttgtgcgctggttacacggcaatgaggagttatccccagagtcctatcttgtatttgaaccgcttaaagagccgggtgaaggcgcaaccacgtacttagttacgtcggtgcttcgcgtctcagccgaaatctggaagcagggcgaccagtacagctgtatggtcggccacgaagcccttccaatgaacttcactcaaaagacgatcgaccgcctgagtggtaagccaactaacgtcagcgtttccgtcattatgtcggagggggacggtatttgttac

SEQ ID NO: 523 - DNA, 99 bp, Homo sapiens
catgcggatggcagtttcagtgatgaaatgaacacgattttggataatttagcagccagggatttcataaactggttaattcaaactaaaataacggat

SEQ ID NO: 524 - DNA, 60 bp, Artificial Sequence
  Description of Artificial Sequence: Synthetic oligonucleotide
ggagggggtggttcgggcggcggtggcagtggaggcggtgggtctggcgggggtggatct

SEQ ID NO: 525 - DNA, 729 bp, Artificial Sequence
  Description of Artificial Sequence: Synthetic polynucleotide
atctgtagccccccgactacgcccccaccgccttcgtgtcagccttcgttgagcttacagcgccctgcattggaagacttattactggggagcgatgctagcatcacatgcacactgaatgggctgcgcgatccagaaggtgccgttttcacgtgggaaccaagcacgggcaaagacgccgtgcaaaagaaggcggtgcagaatagttgtggctgttacagtgtttcttccgttcttccgggttgcgctgaacgctggaactcgggggcgtctttcaaatgtactgtaacgcacccggaatctgacacacttactggaaccattgcgaaagtcacagtcaacacatttccccctcaagtacatctgcttcctcccccatcagaagagttagccctgaacgagttagtcagcctgacatgtcttgtccgcgcattcaatccgaaggaggtccttgtgcgctggttacacggcaatgaggagttatccccagagtcctatcttgtatttgaaccgcttaaagagccgggtgaaggcgcaaccacgtacttagttacgtcggtgcttcgcgtctcagccgaaatctggaagcagggcgaccagtacagctgtatggtcggccacgaagcccttccaatgaacttcactcaaaagacgatcgaccgcctgagtggtaagccaactaacgtcagcgtttccgtcattatgtcggagggggacggtatttgttac

SEQ ID NO: 526 - DNA, 99 bp, Artificial Sequence
  Description of Artificial Sequence: Synthetic oligonucleotide
catggtgatggcagtttcagtgatgaaatgaacacgattttggataatttagcagccagggatttcataaactggttaattcaaactaaaataacggat

SEQ ID NO: 527 - DNA, 729 bp, Artificial Sequence
  Description of Artificial Sequence: Synthetic polynucleotide
atctgtagccccccgactacgcccccaccgccttcgtgtcacccacgtctgtcactgcaccgtccagcattagaagacttactgctgggctccgaggcaaacctgacgtgtactttgacgggattgcgcgacgccagtggagtgacttttacgtggacgcctagcagcggcaaaagtgctgttcagggtccacccgagcgtgacttgtgcgggtgctactctgtgtcctcggtactgcccggctgcgcagagccctggaatcatggtaaaacgtttacctgtacagccgcctaccccgaaagtaaaactcctttgacagcaactctgagcaagtcgggtaatacatttcgtcccgaggttcatcttctgcctcccccttcggaagagcttgcattgaatgagctggtgacattaacctgtctggctcgtggttttagcccgaaagacgtacttgtccgttggctgcaagggagccaggaattgcctcgtgaaaagtatctgacttgggcaagccgccaagaacctagtcaggggacaacaaccttcgcggtaacaagcatcttacgtgttgcggctgaggactggaagaagggtgacacgttctcatgtatggtcggtcacgaggcgttaccacttgcgtttacacaaaagacgattgaccgccttgcgggcaagcctacgcacgtcaatgtcagtgtggtcatggctgaagtggatggaacctgctat

SEQ ID NO: 528 - DNA, 729 bp, Artificial Sequence
  Description of Artificial Sequence: Synthetic polynucleotide
atctgtagccccccgactacgcccccaccgccttcgtgtcacccacgtctgtcactgcaccgtccagcattagaagacttactgctgggctccgaggcaaacctgacgtgtactttgacgggattgcgcgacgccagtggagtgacttttacgtggacgcctagcagcggcaaaagtgctgttcagggtccacccgagcgtgacttgtgcgggtgctactctgtgtcctcggtactgcccggctgcgcagagccctggaatcatggtaaaacgtttacctgtacagccgcctaccccgaaagtaaaactcctttgacagcaactctgagcaagtcgggtaatacatttcgtcccgaggttcatcttctgcctcccccttcggaagagcttgcattgaatgagctggtgacattaacctgtctggctcgtggttttagcccgaaagacgtacttgtccgttggctgcaagggagccaggaattgcctcgtgaaaagtatctgacttgggcaagccgccaagaacctagtcaggggacaacaaccttcgcggtaacaagcatcttacgtgttgcggctgaggactggaagaagggtgacacgttctcatgtatggtcggtcacgaggcgttaccacttgcgtttacacaaaagacgattgaccgccttgcgggtaagcctacgcacgtcaatgtcagtgtggtcatggctgaagtggatggaacctgctat

SEQ ID NO: 529 - DNA, 983 bp, Artificial Sequence
  Description of Artificial Sequence: Synthetic polynucleotide
aaacaatcgaccatcgcattggcgctgcttcctctattgttcacaccggtgacaaaggcacatgcggatggcagtttcagtgatgaaatgaacacgattttggataatttagcagccagggatttcataaactggttaattcaaactaaaataacggatggagggggtggttcgggcggcggtggcagtggaggcggtgggtctggcgggggtggtaccatctgtagccccccgactacgcccccaccgccttcgtgtcacccacgtctgtcactgcaccgtccagcattagaagacttactgctgggctccgaggcaaacctgacgtgtactttgacgggattgcgcgacgccagtggagtgacttttacgtggacgcctagcagcggcaaaagtgctgttcagggtccacccgagcgtgacttgtgcgggtgctactctgtgtcctcggtactgcccggctgcgcagagccctggaatcatggtaaaacgtttacctgtacagccgcctaccccgaaagtaaaactcctttgacagcaactctgagcaagtcgggtaatacatttcgtcccgaggttcatcttctgcctcccccttcggaagagcttgcattgaatgagctggtgacattaacctgtctggctcgtggttttagcccgaaagacgtacttgtccgttggctgcaagggagccaggaattgcctcgtgaaaagtatctgacttgggcaagccgccaagaacctagtcaggggacaacaaccttcgcggtaacaagcatcttacgtgttgcggctgaggactggaagaagggtgacacgttctcatgtatggtcggtcacgaggcgttaccacttgcgtttacacaaaagacgattgaccgccttgcgggcaagcctacgcacgtcaatgtcagtgtggtcatggctgaagtggatggaacctgctatggatccggtcatcaccaccatcaccatcaccattg

SEQ ID NO: 530 - DNA, 983 bp, Artificial Sequence
  Description of Artificial Sequence: Synthetic polynucleotide
aaacaatcgaccatcgcattggcgctgcttcctctattgttcacaccggtgacaaaggcacatgcggatggcagtttcagtgatgaaatgaacacgattttggataatttagcagccagggatttcataaactggttaattcaaactaaaataacggatggagggggtggttcgggcggcggtggcagtggaggcggtgggtctggcgggggtggtaccatctgtagccccccgactacgcccccaccgccttcgtgtcacccacgtctgtcactgcaccgtccagcattagaagacttactgctgggctccgaggcaaacctgacgtgtactttgacgggattgcgcgacgccagtggagtgacttttacgtggacgcctagcagcggcaaaagtgctgttcagggtccacccgagcgtgacttgtgcgggtgctactctgtgtcctcggtactgcccggctgcgcagagccctggaatcatggtaaaacgtttacctgtacagccgcctaccccgaaagtaaaactcctttgacagcaactctgagcaagtcgggtaatacatttcgtcccgaggttcatcttctgcctcccccttcggaagagcttgcattgaatgagctggtgacattaacctgtctggctcgtggttttagcccgaaagacgtacttgtccgttggctgcaagggagccaggaattgcctcgtgaaaagtatctgacttgggcaagccgccaagaacctagtcaggggacaacaaccttcgcggtaacaagcatcttacgtgttgcggctgaggactggaagaagggtgacacgttctcatgtatggtcggtcacgaggcgttaccacttgcgtttacacaaaagacgattgaccgccttgcgggtaagcctacgcacgtcaatgtcagtgtggtcatggctgaagtggatggaacctgctatggatccggtcatcaccaccatcaccatcaccattg

SEQ ID NO: 531 - DNA, 948 bp, Artificial Sequence
  Description of Artificial Sequence: Synthetic polynucleotide
aaacaatcgaccatcgcattggcgctgcttcctctattgttcacaccggtgacaaaggcacatgcggatggcagtttcagtgatgaaatgaacacgattttggataatttagcagccagggatttcataaactggttaattcaaactaaaataacggatggagggggtggttcgggcggcggtggcagtggaggcggtgggtctggcgggggtggtaccatctgtagccccccgactacgcccccaccgccttcgtgtcacccacgtctgtcactgcaccgtccagcattagaagacttactgctgggctccgaggcaaacctgacgtgtactttgacgggattgcgcgacgccagtggagtgacttttacgtggacgcctagcagcggcaaaagtgctgttcagggtccacccgagcgtgacttgtgcgggtgctactctgtgtcctcggtactgcccggctgcgcagagccctggaatcatggtaaaacgtttacctgtacagccgcctaccccgaaagtaaaactcctttgacagcaactctgagcaagtcgggtaatacatttcgtcccgaggttcatcttctgcctcccccttcggaagagcttgcattgaatgagctggtgacattaacctgtctggctcgtggttttagcccgaaagacgtacttgtccgttggctgcaagggagccaggaattgcctcgtgaaaagtatctgacttgggcaagccgccaagaacctagtcaggggacaacaaccttcgcggtaacaagcatcttacgtgttgcggctgaggactggaagaagggtgacacgttctcatgtatggtcggtcacgaggcgttaccacttgcgtttacacaaaagacgattgaccgccttgcgggcaagcctacgcacgtcaatgtcagtgtggtcatggctgaagtggatggaacctgctat

SEQ ID NO: 532 - DNA, 948 bp, Artificial Sequence
  Description of Artificial Sequence: Synthetic polynucleotide
aaacaatcgaccatcgcattggcgctgcttcctctattgttcacaccggtgacaaaggcacatgcggatggcagtttcagtgatgaaatgaacacgattttggataatttagcagccagggatttcataaactggttaattcaaactaaaataacggatggagggggtggttcgggcggcggtggcagtggaggcggtgggtctggcgggggtggtaccatctgtagccccccgactacgcccccaccgccttcgtgtcacccacgtctgtcactgcaccgtccagcattagaagacttactgctgggctccgaggcaaacctgacgtgtactttgacgggattgcgcgacgccagtggagtgacttttacgtggacgcctagcagcggcaaaagtgctgttcagggtccacccgagcgtgacttgtgcgggtgctactctgtgtcctcggtactgcccggctgcgcagagccctggaatcatggtaaaacgtttacctgtacagccgcctaccccgaaagtaaaactcctttgacagcaactctgagcaagtcgggtaatacatttcgtcccgaggttcatcttctgcctcccccttcggaagagcttgcattgaatgagctggtgacattaacctgtctggctcgtggttttagcccgaaagacgtacttgtccgttggctgcaagggagccaggaattgcctcgtgaaaagtatctgacttgggcaagccgccaagaacctagtcaggggacaacaaccttcgcggtaacaagcatcttacgtgttgcggctgaggactggaagaagggtgacacgttctcatgtatggtcggtcacgaggcgttaccacttgcgtttacacaaaagacgattgaccgccttgcgggtaagcctacgcacgtcaatgtcagtgtggtcatggctgaagtggatggaacctgctat

SEQ ID NO: 533 - DNA, 1020 bp, Artificial Sequence
  Description of Artificial Sequence: Synthetic polynucleotide
atggggtacaaaatgaacattagctcgcttcgcaaagcattcatttttatgggggctgttgcagctttaagccttgtcaatgcccagtcagcgcttgcccatgcggatggcagtttcagtgatgaaatgaacacgattttggataatttagcagccagggatttcataaactggttaattcaaactaaaataacggatggagggggtggttcgggcggcggtggcagtggaggcggtgggtctggcgggggtggtaccatctgtagccccccgactacgcccccaccgccttcgtgtcacccacgtctgtcactgcaccgtccagcattagaagacttactgctgggctccgaggcaaacctgacgtgtactttgacgggattgcgcgacgccagtggagtgacttttacgtggacgcctagcagcggcaaaagtgctgttcagggtccacccgagcgtgacttgtgcgggtgctactctgtgtcctcggtactgcccggctgcgcagagccctggaatcatggtaaaacgtttacctgtacagccgcctaccccgaaagtaaaactcctttgacagcaactctgagcaagtcgggtaatacatttcgtcccgaggttcatcttctgcctcccccttcggaagagcttgcattgaatgagctggtgacattaacctgtctggctcgtggttttagcccgaaagacgtacttgtccgttggctgcaagggagccaggaattgcctcgtgaaaagtatctgacttgggcaagccgccaagaacctagtcaggggacaacaaccttcgcggtaacaagcatcttacgtgttgcggctgaggactggaagaagggtgacacgttctcatgtatggtcggtcacgaggcgttaccacttgcgtttacacaaaagacgattgaccgccttgcgggcaagcctacgcacgtcaatgtcagtgtggtcatggctgaagtggatggaacctgctatggatccggtcatcaccaccatcaccatcaccat

SEQ ID NO: 534 - DNA, 1020 bp, Artificial Sequence
  Description of Artificial Sequence: Synthetic polynucleotide
atggggtacaaaatgaacattagctcgcttcgcaaagcattcatttttatgggggctgttgcagctttaagccttgtcaatgcccagtcagcgcttgcccatgcggatggcagtttcagtgatgaaatgaacacgattttggataatttagcagccagggatttcataaactggttaattcaaactaaaataacggatggagggggtggttcgggcggcggtggcagtggaggcggtgggtctggcgggggtggtaccatctgtagccccccgactacgcccccaccgccttcgtgtcacccacgtctgtcactgcaccgtccagcattagaagacttactgctgggctccgaggcaaacctgacgtgtactttgacgggattgcgcgacgccagtggagtgacttttacgtggacgcctagcagcggcaaaagtgctgttcagggtccacccgagcgtgacttgtgcgggtgctactctgtgtcctcggtactgcccggctgcgcagagccctggaatcatggtaaaacgtttacctgtacagccgcctaccccgaaagtaaaactcctttgacagcaactctgagcaagtcgggtaatacatttcgtcccgaggttcatcttctgcctcccccttcggaagagcttgcattgaatgagctggtgacattaacctgtctggctcgtggttttagcccgaaagacgtacttgtccgttggctgcaagggagccaggaattgcctcgtgaaaagtatctgacttgggcaagccgccaagaacctagtcaggggacaacaaccttcgcggtaacaagcatcttacgtgttgcggctgaggactggaagaagggtgacacgttctcatgtatggtcggtcacgaggcgttaccacttgcgtttacacaaaagacgattgaccgccttgcgggtaagcctacgcacgtcaatgtcagtgtggtcatggctgaagtggatggaacctgctatggatccggtcatcaccaccatcaccatcaccat

SEQ ID NO: 535 - DNA, 987 bp, Artificial Sequence
  Description of Artificial Sequence: Synthetic polynucleotide
atggggtacaaaatgaacattagctcgcttcgcaaagcattcatttttatgggggctgttgcagctttaagccttgtcaatgcccagtcagcgcttgcccatgcggatggcagtttcagtgatgaaatgaacacgattttggataatttagcagccagggatttcataaactggttaattcaaactaaaataacggatggagggggtggttcgggcggcggtggcagtggaggcggtgggtctggcgggggtggtaccatctgtagccccccgactacgcccccaccgccttcgtgtcacccacgtctgtcactgcaccgtccagcattagaagacttactgctgggctccgaggcaaacctgacgtgtactttgacgggattgcgcgacgccagtggagtgacttttacgtggacgcctagcagcggcaaaagtgctgttcagggtccacccgagcgtgacttgtgcgggtgctactctgtgtcctcggtactgcccggctgcgcagagccctggaatcatggtaaaacgtttacctgtacagccgcctaccccgaaagtaaaactcctttgacagcaactctgagcaagtcgggtaatacatttcgtcccgaggttcatcttctgcctcccccttcggaagagcttgcattgaatgagctggtgacattaacctgtctggctcgtggttttagcccgaaagacgtacttgtccgttggctgcaagggagccaggaattgcctcgtgaaaagtatctgacttgggcaagccgccaagaacctagtcaggggacaacaaccttcgcggtaacaagcatcttacgtgttgcggctgaggactggaagaagggtgacacgttctcatgtatggtcggtcacgaggcgttaccacttgcgtttacacaaaagacgattgaccgccttgcgggcaagcctacgcacgtcaatgtcagtgtggtcatggctgaagtggatggaacctgctat

SEQ ID NO: 536 - DNA, 987 bp, Artificial Sequence
  Description of Artificial Sequence: Synthetic polynucleotide
atggggtacaaaatgaacattagctcgcttcgcaaagcattcatttttatgggggctgttgcagctttaagccttgtcaatgcccagtcagcgcttgcccatgcggatggcagtttcagtgatgaaatgaacacgattttggataatttagcagccagggatttcataaactggttaattcaaactaaaataacggatggagggggtggttcgggcggcggtggcagtggaggcggtgggtctggcgggggtggtaccatctgtagccccccgactacgcccccaccgccttcgtgtcacccacgtctgtcactgcaccgtccagcattagaagacttactgctgggctccgaggcaaacctgacgtgtactttgacgggattgcgcgacgccagtggagtgacttttacgtggacgcctagcagcggcaaaagtgctgttcagggtccacccgagcgtgacttgtgcgggtgctactctgtgtcctcggtactgcccggctgcgcagagccctggaatcatggtaaaacgtttacctgtacagccgcctaccccgaaagtaaaactcctttgacagcaactctgagcaagtcgggtaatacatttcgtcccgaggttcatcttctgcctcccccttcggaagagcttgcattgaatgagctggtgacattaacctgtctggctcgtggttttagcccgaaagacgtacttgtccgttggctgcaagggagccaggaattgcctcgtgaaaagtatctgacttgggcaagccgccaagaacctagtcaggggacaacaaccttcgcggtaacaagcatcttacgtgttgcggctgaggactggaagaagggtgacacgttctcatgtatggtcggtcacgaggcgttaccacttgcgtttacacaaaagacgattgaccgccttgcgggtaagcctacgcacgtcaatgtcagtgtggtcatggctgaagtggatggaacctgctat

SEQ ID NO: 537 - protein, 297 aa, Artificial Sequence
  Description of Artificial Sequence: Synthetic polypeptide
HADGSFSDEMNTILDNLAARDFINWLIQTKITDGGGGSGGGGSGGGGSGGGGSTICSPPTTPPPPSCHPRLSLHRPALEDLLLGSEANLTCTLTGLRDASGVTFTWTPSSGKSAVQGPPERDLCGCYSVSSVLPGCAEPWNHGKTFTCTAAYPESKTPLTATLSKSGNTFRPEVHLLPPPSEELALNELVTLTCLARGFSPKDVLVRWLQGSQELPREKYLTWASRQEPSQGTTTFAVTSILRVAAEDWKKGDTFSCMVGHEALPLAFTQKTIDRLAGKPTHVNVSVVMAEVDGTCY

SEQ ID NO: 538 - protein, 54 aa, Artificial Sequence
  Description of Artificial Sequence: Synthetic polypeptide
MKQSTIALALLPLLFTPVTKAHADGSFSDEMNTILDNLAARDFINWLIQTKITD

SEQ ID NO: 539 - protein, 66 aa, Artificial Sequence
  Description of Artificial Sequence: Synthetic polypeptide
MGYKMNISSLRKAFIFMGAVAALSLVNAQSALAHADGSFSDEMNTILDNLAARDFINWLIQTKITD

SEQ ID NO: 540 - protein, 296 aa, Artificial Sequence
  Description of Artificial Sequence: Synthetic polypeptide
HGDGSFSDEMNTILDNLAARDFINWLIQTKITDGGGGSGGGGSGGGGSGGGGSICSPPTTPPPPSCHPRLSLHRPALEDLLLGSEANLTCTLTGLRDASGVTFTWTPSSGKSAVQGPPERDLCGCYSVSSVLPGCAEPWNHGKTFTCTAAYPESKTPLTATLSKSGNTFRPEVHLLPPPSEELALNELVTLTCLARGFSPKDVLVRWLQGSQELPREKYLTWASRQEPSQGTTTFAVTSILRVAAEDWKKGDTFSCMVGHEALPLAFTQKTIDRLAGKPTHVNVSVVMAEVDGTCY

SEQ ID NO: 541 - protein, 54 aa, Artificial Sequence
  Description of Artificial Sequence: Synthetic polypeptide
MKQSTIALALLPLLFTPVTKAHGDGSFSDEMNTILDNLAARDFINWLIQTKITD

SEQ ID NO: 542 - protein, 66 aa, Artificial Sequence
  Description of Artificial Sequence: Synthetic polypeptide
MGYKMNISSLRKAFIFMGAVAALSLVNAQSALAHGDGSFSDEMNTILDNLAARDFINWLIQTKITD

SEQ ID NO: 543 - protein, 328 aa, Artificial Sequence
  Description of Artificial Sequence: Synthetic polypeptide
MKQSTIALALLPLLFTPVTKAHGDGSFSDEMNTILDNLAARDFINWLIQTKITDGGGGSGGGGSGGGGSGGGGSICSPPTTPPPPSCHPRLSLHRPALEDLLLGSEANLTCTLTGLRDASGVTFTWTPSSGKSAVQGPPERDLCGCYSVSSVLPGCAEPWNHGKTFTCTAAYPESKTPLTATLSKSGNTFRPEVHLLPPPSEELALNELVTLTCLARGFSPKDVLVRWLQGSQELPREKYLTWASRQEPSQGTTTFAVTSILRVAAEDWKKGDTFSCMVGHEALPLAFTQKTIDRLAGKPTHVNVSVVMAEVDGTCYGSGHHHHHHHH

SEQ ID NO: 544 - protein, 317 aa, Artificial Sequence
  Description of Artificial Sequence: Synthetic polypeptide
MKQSTIALALLPLLFTPVTKAHGDGSFSDEMNTILDNLAARDFINWLIQTKITDGGGGSGGGGSGGGGSGGGGSICSPPTTPPPPSCHPRLSLHRPALEDLLLGSEANLTCTLTGLRDASGVTFTWTPSSGKSAVQGPPERDLCGCYSVSSVLPGCAEPWNHGKTFTCTAAYPESKTPLTATLSKSGNTFRPEVHLLPPPSEELALNELVTLTCLARGFSPKDVLVRWLQGSQELPREKYLTWASRQEPSQGTTTFAVTSILRVAAEDWKKGDTFSCMVGHEALPLAFTQKTIDRLAGKPTHVNVSVVMAEVDGTCY

SEQ ID NO: 545 - protein, 340 aa, Artificial Sequence
  Description of Artificial Sequence: Synthetic polypeptide
MGYKMNISSLRKAFIFMGAVAALSLVNAQSALAHGDGSFSDEMNTILDNLAARDFINWLIQTKITDGGGGSGGGGSGGGGSGGGGSICSPPTTPPPPSCHPRLSLHRPALEDLLLGSEANLTCTLTGLRDASGVTFTWTPSSGKSAVQGPPERDLCGCYSVSSVLPGCAEPWNHGKTFTCTAAYPESKTPLTATLSKSGNTFRPEVHLLPPPSEELALNELVTLTCLARGFSPKDVLVRWLQGSQELPREKYLTWASRQEPSQGTTTFAVTSILRVAAEDWKKGDTFSCMVGHEALPLAFTQKTIDRLAGKPTHVNVSVVMAEVDGTCYGSGHHHHHHHH

SEQ ID NO: 546 - protein, 329 aa, Artificial Sequence
  Description of Artificial Sequence: Synthetic polypeptide
MGYKMNISSLRKAFIFMGAVAALSLVNAQSALAHGDGSFSDEMNTILDNLAARDFINWLIQTKITDGGGGSGGGGSGGGGSGGGGSICSPPTTPPPPSCHPRLSLHRPALEDLLLGSEANLTCTLTGLRDASGVTFTWTPSSGKSAVQGPPERDLCGCYSVSSVLPGCAEPWNHGKTFTCTAAYPESKTPLTATLSKSGNTFRPEVHLLPPPSEELALNELVTLTCLARGFSPKDVLVRWLQGSQELPREKYLTWASRQEPSQGTTTFAVTSILRVAAEDWKKGDTFSCMVGHEALPLAFTQKTIDRLAGKPTHVNVSVVMAEVDGTCY

SEQ ID NO: 547 - DNA, 888 bp, Artificial Sequence
  Description of Artificial Sequence: Synthetic polynucleotide
catgcggatggcagtttcagtgatgaaatgaacacgattttggataatttagcagccagggatttcataaactggttaattcaaactaaaataacggatggagggggtggttcgggcggcggtggcagtggaggcggtgggtctggcgggggtggtaccatctgtagccccccgactacgcccccaccgccttcgtgtcacccacgtctgtcactgcaccgtccagcattagaagacttactgctgggctccgaggcaaacctgacgtgtactttgacgggattgcgcgacgccagtggagtgacttttacgtggacgcctagcagcggcaaaagtgctgttcagggtccacccgagcgtgacttgtgcgggtgctactctgtgtcctcggtactgcccggctgcgcagagccctggaatcatggtaaaacgtttacctgtacagccgcctaccccgaaagtaaaactcctttgacagcaactctgagcaagtcgggtaatacatttcgtcccgaggttcatcttctgcctcccccttcggaagagcttgcattgaatgagctggtgacattaacctgtctggctcgtggttttagcccgaaagacgtacttgtccgttggctgcaagggagccaggaattgcctcgtgaaaagtatctgacttgggcaagccgccaagaacctagtcaggggacaacaaccttcgcggtaacaagcatcttacgtgttgcggctgaggactggaagaagggtgacacgttctcatgtatggtcggtcacgaggcgttaccacttgcgtttacacaaaagacgattgaccgccttgcgggcaagcctacgcacgtcaatgtcagtgtggtcatggctgaagtggatggaacctgctat

SEQ ID NO: 548 - DNA, 888 bp, Artificial Sequence
  Description of Artificial Sequence: Synthetic polynucleotide
catgcggatggcagtttcagtgatgaaatgaacacgattttggataatttagcagccagggatttcataaactggttaattcaaactaaaataacggatggagggggtggttcgggcggcggtggcagtggaggcggtgggtctggcgggggtggtaccatctgtagccccccgactacgcccccaccgccttcgtgtcacccacgtctgtcactgcaccgtccagcattagaagacttactgctgggctccgaggcaaacctgacgtgtactttgacgggattgcgcgacgccagtggagtgacttttacgtggacgcctagcagcggcaaaagtgctgttcagggtccacccgagcgtgacttgtgcgggtgctactctgtgtcctcggtactgcccggctgcgcagagccctggaatcatggtaaaacgtttacctgtacagccgcctaccccgaaagtaaaactcctttgacagcaactctgagcaagtcgggtaatacatttcgtcccgaggttcatcttctgcctcccccttcggaagagcttgcattgaatgagctggtgacattaacctgtctggctcgtggttttagcccgaaagacgtacttgtccgttggctgcaagggagccaggaattgcctcgtgaaaagtatctgacttgggcaagccgccaagaacctagtcaggggacaacaaccttcgcggtaacaagcatcttacgtgttgcggctgaggactggaagaagggtgacacgttctcatgtatggtcggtcacgaggcgttaccacttgcgtttacacaaaagacgattgaccgccttgcgggtaagcctacgcacgtcaatgtcagtgtggtcatggctgaagtggatggaacctgctat

SEQ ID NO: 549 - DNA, 159 bp, Artificial Sequence
  Description of Artificial Sequence: Synthetic polynucleotide
aaacaatcgaccatcgcattggcgctgcttcctctattgttcacaccggtgacaaaggcacatgcggatggcagtttcagtgatgaaatgaacacgattttggataatttagcagccagggatttcataaactggttaattcaaactaaaataacggat

SEQ ID NO: 550 - DNA, 198 bp, Artificial Sequence
  Description of Artificial Sequence: Synthetic polynucleotide
atggggtacaaaatgaacattagctcgcttcgcaaagcattcatttttatgggggctgttgcagctttaagccttgtcaatgcccagtcagcgcttgcccatgcggatggcagtttcagtgatgaaatgaacacgattttggataatttagcagccagggatttcataaactggttaattcaaactaaaataacggat

SEQ ID NO: 551 - DNA, 983 bp, Artificial Sequence
  Description of Artificial Sequence: Synthetic polynucleotide
aaacaatcgaccatcgcattggcgctgcttcctctattgttcacaccggtgacaaaggcacatggtgatggcagtttcagtgatgaaatgaacacgattttggataatttagcagccagggatttcataaactggttaattcaaactaaaataacggatggagggggtggttcgggcggcggtggcagtggaggcggtgggtctggcgggggtggtaccatctgtagccccccgactacgcccccaccgccttcgtgtcacccacgtctgtcactgcaccgtccagcattagaagacttactgctgggctccgaggcaaacctgacgtgtactttgacgggattgcgcgacgccagtggagtgacttttacgtggacgcctagcagcggcaaaagtgctgttcagggtccacccgagcgtgacttgtgcgggtgctactctgtgtcctcggtactgcccggctgcgcagagccctggaatcatggtaaaacgtttacctgtacagccgcctaccccgaaagtaaaactcctttgacagcaactctgagcaagtcgggtaatacatttcgtcccgaggttcatcttctgcctcccccttcggaagagcttgcattgaatgagctggtgacattaacctgtctggctcgtggttttagcccgaaagacgtacttgtccgttggctgcaagggagccaggaattgcctcgtgaaaagtatctgacttgggcaagccgccaagaacctagtcaggggacaacaaccttcgcggtaacaagcatcttacgtgttgcggctgaggactggaagaagggtgacacgttctcatgtatggtcggtcacgaggcgttaccacttgcgtttacacaaaagacgattgaccgccttgcgggcaagcctacgcacgtcaatgtcagtgtggtcatggctgaagtggatggaacctgctatggatccggtcatcaccaccatcaccatcaccattg

SEQ ID NO: 552 - DNA, 983 bp, Artificial Sequence
  Description of Artificial Sequence: Synthetic polynucleotide
aaacaatcgaccatcgcattggcgctgcttcctctattgttcacaccggtgacaaaggcacatggtgatggcagtttcagtgatgaaatgaacacgattttggataatttagcagccagggatttcataaactggttaattcaaactaaaataacggatggagggggtggttcgggcggcggtggcagtggaggcggtgggtctggcgggggtggtaccatctgtagccccccgactacgcccccaccgccttcgtgtcacccacgtctgtcactgcaccgtccagcattagaagacttactgctgggctccgaggcaaacctgacgtgtactttgacgggattgcgcgacgccagtggagtgacttttacgtggacgcctagcagcggcaaaagtgctgttcagggtccacccgagcgtgacttgtgcgggtgctactctgtgtcctcggtactgcccggctgcgcagagccctggaatcatggtaaaacgtttacctgtacagccgcctaccccgaaagtaaaactcctttgacagcaactctgagcaagtcgggtaatacatttcgtcccgaggttcatcttctgcctcccccttcggaagagcttgcattgaatgagctggtgacattaacctgtctggctcgtggttttagcccgaaagacgtacttgtccgttggctgcaagggagccaggaattgcctcgtgaaaagtatctgacttgggcaagccgccaagaacctagtcaggggacaacaaccttcgcggtaacaagcatcttacgtgttgcggctgaggactggaagaagggtgacacgttctcatgtatggtcggtcacgaggcgttaccacttgcgtttacacaaaagacgattgaccgccttgcgggtaagcctacgcacgtcaatgtcagtgtggtcatggctgaagtggatggaacctgctatggatccggtcatcaccaccatcaccatcaccattg

SEQ ID NO: 553 - DNA, 948 bp, Artificial Sequence
  Description of Artificial Sequence: Synthetic polynucleotide
aaacaatcgaccatcgcattggcgctgcttcctctattgttcacaccggtgacaaaggcacatggtgatggcagtttcagtgatgaaatgaacacgattttggataatttagcagccagggatttcataaactggttaattcaaactaaaataacggatggagggggtggttcgggcggcggtggcagtggaggcggtgggtctggcgggggtggtaccatctgtagccccccgactacgcccccaccgccttcgtgtcacccacgtctgtcactgcaccgtccagcattagaagacttactgctgggctccgaggcaaacctgacgtgtactttgacgggattgcgcgacgccagtggagtgacttttacgtggacgcctagcagcggcaaaagtgctgttcagggtccacccgagcgtgacttgtgcgggtgctactctgtgtcctcggtactgcccggctgcgcagagccctggaatcatggtaaaacgtttacctgtacagccgcctaccccgaaagtaaaactcctttgacagcaactctgagcaagtcgggtaatacatttcgtcccgaggttcatcttctgcctcccccttcggaagagcttgcattgaatgagctggtgacattaacctgtctggctcgtggttttagcccgaaagacgtacttgtccgttggctgcaagggagccaggaattgcctcgtgaaaagtatctgacttgggcaagccgccaagaacctagtcaggggacaacaaccttcgcggtaacaagcatcttacgtgttgcggctgaggactggaagaagggtgacacgttctcatgtatggtcggtcacgaggcgttaccacttgcgtttacacaaaagacgattgaccgccttgcgggcaagcctacgcacgtcaatgtcagtgtggtcatggctgaagtggatggaacctgctat

SEQ ID NO: 554 - DNA, 948 bp, Artificial Sequence
  Description of Artificial Sequence: Synthetic polynucleotide
aaacaatcgaccatcgcattggcgctgcttcctctattgttcacaccggtgacaaaggcacatggtgatggcagtttcagtgatgaaatgaacacgattttggataatttagcagccagggatttcataaactggttaattcaaactaaaataacggatggagggggtggttcgggcggcggtggcagtggaggcggtgggtctggcgggggtggtaccatctgtagccccccgactacgcccccaccgccttcgtgtcacccacgtctgtcactgcaccgtccagcattagaagacttactgctgggctccgaggcaaacctgacgtgtactttgacgggattgcgcgacgccagtggagtgacttttacgtggacgcctagcagcggcaaaagtgctgttcagggtccacccgagcgtgacttgtgcgggtgctactctgtgtcctcggtactgcccggctgcgcagagccctggaatcatggtaaaacgtttacctgtacagccgcctaccccgaaagtaaaactcctttgacagcaactctgagcaagtcgggtaatacatttcgtcccgaggttcatcttctgcctcccccttcggaagagcttgcattgaatgagctggtgacattaacctgtctggctcgtggttttagcccgaaagacgtacttgtccgttggctgcaagggagccaggaattgcctcgtgaaaagtatctgacttgggcaagccgccaagaacctagtcaggggacaacaaccttcgcggtaacaagcatcttacgtgttgcggctgaggactggaagaagggtgacacgttctcatgtatggtcggtcacgaggcgttaccacttgcgtttacacaaaagacgattgaccgccttgcgggtaagcctacgcacgtcaatgtcagtgtggtcatggctgaagtggatggaacctgctat

SEQ ID NO: 555 - DNA, 1020 bp, Artificial Sequence
  Description of Artificial Sequence: Synthetic polynucleotide
atggggtacaaaatgaacattagctcgcttcgcaaagcattcatttttatgggggctgttgcagctttaagccttgtcaatgcccagtcagcgcttgcccatggtgatggcagtttcagtgatgaaatgaacacgattttggataatttagcagccagggatttcataaactggttaattcaaactaaaataacggatggagggggtggttcgggcggcggtggcagtggaggcggtgggtctggcgggggtggtaccatctgtagccccccgactacgcccccaccgccttcgtgtcacccacgtctgtcactgcaccgtccagcattagaagacttactgctgggctccgaggcaaacctgacgtgtactttgacgggattgcgcgacgccagtggagtgacttttacgtggacgcctagcagcggcaaaagtgctgttcagggtccacccgagcgtgacttgtgcgggtgctactctgtgtcctcggtactgcccggctgcgcagagccctggaatcatggtaaaacgtttacctgtacagccgcctaccccgaaagtaaaactcctttgacagcaactctgagcaagtcgggtaatacatttcgtcccgaggttcatcttctgcctcccccttcggaagagcttgcattgaatgagctggtgacattaacctgtctggctcgtggttttagcccgaaagacgtacttgtccgttggctgcaagggagccaggaattgcctcgtgaaaagtatctgacttgggcaagccgccaagaacctagtcaggggacaacaaccttcgcggtaacaagcatcttacgtgttgcggctgaggactggaagaagggtgacacgttctcatgtatggtcggtcacgaggcgttaccacttgcgtttacacaaaagacgattgaccgccttgcgggcaagcctacgcacgtcaatgtcagtgtggtcatggctgaagtggatggaacctgctatggatccggtcatcaccaccatcaccatcaccat

SEQ ID NO: 556 - DNA, 1020 bp, Artificial Sequence
  Description of Artificial Sequence: Synthetic polynucleotide
atggggtacaaaatgaacattagctcgcttcgcaaagcattcatttttatgggggctgttgcagctttaagccttgtcaatgcccagtcagcgcttgcccatggtgatggcagtttcagtgatgaaatgaacacgattttggataatttagcagccagggatttcataaactggttaattcaaactaaaataacggatggagggggtggttcgggcggcggtggcagtggaggcggtgggtctggcgggggtggtaccatctgtagccccccgactacgcccccaccgccttcgtgtcacccacgtctgtcactgcaccgtccagcattagaagacttactgctgggctccgaggcaaacctgacgtgtactttgacgggattgcgcgacgccagtggagtgacttttacgtggacgcctagcagcggcaaaagtgctgttcagggtccacccgagcgtgacttgtgcgggtgctactctgtgtcctcggtactgcccggctgcgcagagccctggaatcatggtaaaacgtttacctgtacagccgcctaccccgaaagtaaaactcctttgacagcaactctgagcaagtcgggtaatacatttcgtcccgaggttcatcttctgcctcccccttcggaagagcttgcattgaatgagctggtgacattaacctgtctggctcgtggttttagcccgaaagacgtacttgtccgttggctgcaagggagccaggaattgcctcgtgaaaagtatctgacttgggcaagccgccaagaacctagtcaggggacaacaaccttcgcggtaacaagcatcttacgtgttgcggctgaggactggaagaagggtgacacgttctcatgtatggtcggtcacgaggcgttaccacttgcgtttacacaaaagacgattgaccgccttgcgggtaagcctacgcacgtcaatgtcagtgtggtcatggctgaagtggatggaacctgctatggatccggtcatcaccaccatcaccatcaccat

SEQ ID NO: 557 - DNA, 987 bp, Artificial Sequence
  Description of Artificial Sequence: Synthetic polynucleotide
atggggtacaaaatgaacattagctcgcttcgcaaagcattcatttttatgggggctgttgcagctttaagccttgtcaatgcccagtcagcgcttgcccatggtgatggcagtttcagtgatgaaatgaacacgattttggataatttagcagccagggatttcataaactggttaattcaaactaaaataacggatggagggggtggttcgggcggcggtggcagtggaggcggtgggtctggcgggggtggtaccatctgtagccccccgactacgcccccaccgccttcgtgtcacccacgtctgtcactgcaccgtccagcattagaagacttactgctgggctccgaggcaaacctgacgtgtactttgacgggattgcgcgacgccagtggagtgacttttacgtggacgcctagcagcggcaaaagtgctgttcagggtccacccgagcgtgacttgtgcgggtgctactctgtgtcctcggtactgcccggctgcgcagagccctggaatcatggtaaaacgtttacctgtacagccgcctaccccgaaagtaaaactcctttgacagcaactctgagcaagtcgggtaatacatttcgtcccgaggttcatcttctgcctcccccttcggaagagcttgcattgaatgagctggtgacattaacctgtctggctcgtggttttagcccgaaagacgtacttgtccgttggctgcaagggagccaggaattgcctcgtgaaaagtatctgacttgggcaagccgccaagaacctagtcaggggacaacaaccttcgcggtaacaagcatcttacgtgttgcggctgaggactggaagaagggtgacacgttctcatgtatggtcggtcacgaggcgttaccacttgcgtttacacaaaagacgattgaccgccttgcgggcaagcctacgcacgtcaatgtcagtgtggtcatggctgaagtggatggaacctgctat

SEQ ID NO: 558 - DNA, 987 bp, Artificial Sequence
  Description of Artificial Sequence: Synthetic polynucleotide
atggggtacaaaatgaacattagctcgcttcgcaaagcattcatttttatgggggctgttgcagctttaagccttgtcaatgcccagtcagcgcttgcccatggtgatggcagtttcagtgatgaaatgaacacgattttggataatttagcagccagggatttcataaactggttaattcaaactaaaataacggatggagggggtggttcgggcggcggtggcagtggaggcggtgggtctggcgggggtggtaccatctgtagccccccgactacgcccccaccgccttcgtgtcacccacgtctgtcactgcaccgtccagcattagaagacttactgctgggctccgaggcaaacctgacgtgtactttgacgggattgcgcgacgccagtggagtgacttttacgtggacgcctagcagcggcaaaagtgctgttcagggtccacccgagcgtgacttgtgcgggtgctactctgtgtcctcggtactgcccggctgcgcagagccctggaatcatggtaaaacgtttacctgtacagccgcctaccccgaaagtaaaactcctttgacagcaactctgagcaagtcgggtaatacatttcgtcccgaggttcatcttctgcctcccccttcggaagagcttgcattgaatgagctggtgacattaacctgtctggctcgtggttttagcccgaaagacgtacttgtccgttggctgcaagggagccaggaattgcctcgtgaaaagtatctgacttgggcaagccgccaagaacctagtcaggggacaacaaccttcgcggtaacaagcatcttacgtgttgcggctgaggactggaagaagggtgacacgttctcatgtatggtcggtcacgaggcgttaccacttgcgtttacacaaaagacgattgaccgccttgcgggtaagcctacgcacgtcaatgtcagtgtggtcatggctgaagtggatggaacctgctat

SEQ ID NO: 559 - DNA, 888 bp, Artificial Sequence
  Description of Artificial Sequence: Synthetic polynucleotide
catggtgatggcagtttcagtgatgaaatgaacacgattttggataatttagcagccagggatttcataaactggttaattcaaactaaaataacggatggagggggtggttcgggcggcggtggcagtggaggcggtgggtctggcgggggtggtaccatctgtagccccccgactacgcccccaccgccttcgtgtcacccacgtctgtcactgcaccgtccagcattagaagacttactgctgggctccgaggcaaacctgacgtgtactttgacgggattgcgcgacgccagtggagtgacttttacgtggacgcctagcagcggcaaaagtgctgttcagggtccacccgagcgtgacttgtgcgggtgctactctgtgtcctcggtactgcccggctgcgcagagccctggaatcatggtaaaacgtttacctgtacagccgcctaccccgaaagtaaaactcctttgacagcaactctgagcaagtcgggtaatacatttcgtcccgaggttcatcttctgcctcccccttcggaagagcttgcattgaatgagctggtgacattaacctgtctggctcgtggttttagcccgaaagacgtacttgtccgttggctgcaagggagccaggaattgcctcgtgaaaagtatctgacttgggcaagccgccaagaacctagtcaggggacaacaaccttcgcggtaacaagcatcttacgtgttgcggctgaggactggaagaagggtgacacgttctcatgtatggtcggtcacgaggcgttaccacttgcgtttacacaaaagacgattgaccgccttgcgggcaagcctacgcacgtcaatgtcagtgtggtcatggctgaagtggatggaacctgctat

SEQ ID NO: 560 - DNA, 888 bp, Artificial Sequence
  Description of Artificial Sequence: Synthetic polynucleotide
catggtgatggcagtttcagtgatgaaatgaacacgattttggataatttagcagccagggatttcataaactggttaattcaaactaaaataacggatggagggggtggttcgggcggcggtggcagtggaggcggtgggtctggcgggggtggtaccatctgtagccccccgactacgcccccaccgccttcgtgtcacccacgtctgtcactgcaccgtccagcattagaagacttactgctgggctccgaggcaaacctgacgtgtactttgacgggattgcgcgacgccagtggagtgacttttacgtggacgcctagcagcggcaaaagtgctgttcagggtccacccgagcgtgacttgtgcgggtgctactctgtgtcctcggtactgcccggctgcgcagagccctggaatcatggtaaaacgtttacctgtacagccgcctaccccgaaagtaaaactcctttgacagcaactctgagcaagtcgggtaatacatttcgtcccgaggttcatcttctgcctcccccttcggaagagcttgcattgaatgagctggtgacattaacctgtctggctcgtggttttagcccgaaagacgtacttgtccgttggctgcaagggagccaggaattgcctcgtgaaaagtatctgacttgggcaagccgccaagaacctagtcaggggacaacaaccttcgcggtaacaagcatcttacgtgttgcggctgaggactggaagaagggtgacacgttctcatgtatggtcggtcacgaggcgttaccacttgcgtttacacaaaagacgattgaccgccttgcgggtaagcctacgcacgtcaatgtcagtgtggtcatggctgaagtggatggaacctgctat

SEQ ID NO: 561 - DNA, 159 bp, Artificial Sequence
  Description of Artificial Sequence: Synthetic polynucleotide
aaacaatcgaccatcgcattggcgctgcttcctctattgttcacaccggtgacaaaggcacatggtgatggcagtttcagtgatgaaatgaacacgattttggataatttagcagccagggatttcataaactggttaattcaaactaaaataacggat

SEQ ID NO: 562 - DNA, 198 bp, Artificial Sequence
  Description of Artificial Sequence: Synthetic polynucleotide
atggggtacaaaatgaacattagctcgcttcgcaaagcattcatttttatgggggctgttgcagctttaagccttgtcaatgcccagtcagcgcttgcccatggtgatggcagtttcagtgatgaaatgaacacgattttggataatttagcagccagggatttcataaactggttaattcaaactaaaataacggat

SEQ ID NO: 563 - protein, 181 aa, Artificial Sequence
  Description of Artificial Sequence: Synthetic polypeptide
MKQSTIALALLPLLFTPVTKASPGQGTQSENSCTHFPGNLPNMLRDLRDAFSRVKTFFQMKDQLDNLLLKESLLEDFKGYLGCQALSEMIQFYLEEVMPQAENQDPDIKAHVNSLGENLKTLRLRLRRCHRFLPCENKSKAVEQVKNAFNKLQEKGIYKAMSEFDIFINYIEAYMTMKIRN

SEQ ID NO: 564 - protein, 193 aa, Artificial Sequence
  Description of Artificial Sequence: Synthetic polypeptide
MGYKMNISSLRKAFIFMGAVAALSLVNAQSALASPGQGTQSENSCTHFPGNLPNMLRDLRDAFSRVKTFFQMKDQLDNLLLKESLLEDFKGYLGCQALSEMIQFYLEEVMPQAENQDPDIKAHVNSLGENLKTLRLRLRRCHRFLPCENKSKAVEQVKNAFNKLQEKGIYKAMSEFDIFINYIEAYMTMKIRN

SEQ ID NO: 565 - DNA, 543 bp, Artificial Sequence
  Description of Artificial Sequence: Synthetic polynucleotide
atgaaacaatcgaccatcgcattggcgctgcttcctctattgttcacaccggtgacaaaggcaagccccggacaaggcacccaatcagagaatagctgtacacatttccctggtaatcttcctaatatgctgcgtgacctgcgcgatgcgttcagtcgcgttaaaactttttttcaaatgaaagaccagttggataaccttttattaaaagaatcactgttagaggattttaaggggtatctgggatgccaggccctgtccgagatgattcaattttacctggaagaggtaatgccccaagctgagaaccaggacccggacatcaaggcgcacgttaactctttaggggagaatctgaaaaccttacgtctgcgtcttcgtcgctgccatcgcttccttccgtgcgaaaataaatcgaaagccgtggagcaagtcaaaaacgctttcaataagctgcaggagaagggaatttataaggctatgagtgagttcgatattttcattaactacattgaggcttatatgacaatgaagattcgcaat

SEQ ID NO: 566 - DNA, 579 bp, Artificial Sequence
  Description of Artificial Sequence: Synthetic polynucleotide
atggggtacaaaatgaacattagctcgcttcgcaaagcattcatttttatgggggctgttgcagctttaagccttgtcaatgcccagtcagcgcttgccagccccggacaaggcacccaatcagagaatagctgtacacatttccctggtaatcttcctaatatgctgcgtgacctgcgcgatgcgttcagtcgcgttaaaactttttttcaaatgaaagaccagttggataaccttttattaaaagaatcactgttagaggattttaaggggtatctgggatgccaggccctgtccgagatgattcaattttacctggaagaggtaatgccccaagctgagaaccaggacccggacatcaaggcgcacgttaactctttaggggagaatctgaaaaccttacgtctgcgtcttcgtcgctgccatcgcttccttccgtgcgaaaataaatcgaaagccgtggagcaagtcaaaaacgctttcaataagctgcaggagaagggaatttataaggctatgagtgagttcgatattttcattaactacattgaggcttatatgacaatgaagattcgcaat

SEQ ID NO: 567-764 - skipped (198 entries)

SEQ ID NO: 765 - protein, 242 aa, Artificial Sequence
  Description of Artificial Sequence: Synthetic polypeptide
MQVQLVESGGGVVQPGRSLRLSCAASGFTFSSYTMHWVRQAPGKGLEWVTFISYDGNNKYYADSVKGRFTISRDNSKNTLYLQMNSLRAEDTAIYYCARTGWLGPFDYWGQGTLVTVSSGGGSGGGSGGGSGGGEIVLTQSPGTLSLSPGERATLSCRASQSVGSSYLAWYQQKPGQAPRLLIYGAFSRATGIPDRFSGSGSGTDFTLTISRLEPEDFAVYYCQQYGSSPWTFGQGTKVEIK

SEQ ID NO: 766 - DNA, 1103 bp, Artificial Sequence
  Description of Artificial Sequence: Synthetic polynucleotide
agcgggaataaggggcagagaaaagagtatttcgtcgactaacaaaaaatggctgtttgtgaaaaaaattctaaaggttgttttacgacagacgataacagggttgacggcgattgagccgacgggtggaaacccaaaacgtaatcaacaaataaaaatgaggaggcaattctaatgcaagtgcaactggtagagtccggtgggggcgtggtgcagccgggtcgcagcctgcgtctgtcgtgcgcggcgagtggttttacgttttcgagttatactatgcactgggttcgtcaagcgccgggcaaaggcctggaatgggttactttcatttcttacgatggtaataataaatattatgcggattctgtgaaaggtcgctttactatttcgcgcgataacagtaaaaacactctgtatctgcaaatgaattctctgcgtgcagaggatactgctatctattactgcgcgcgtacgggctggttgggcccgtttgattattggggccaaggcactttggttactgtgtcatcgggcgggggctctggcggtggttcaggtggtggcagtggtggtggcgagatcgtgttgactcaatctccgggtactctgtctctgtctccgggtgaacgcgcgaccctgtcttgccgcgcttctcagagtgttggttcatcgtatctggcatggtatcaacagaaaccgggtcaagcgccgcgtctgctgatttacggtgcttttagtcgcgcaaccgggattccggatcgattttctggttcaggttctggcactgactttactttgactattagtcgtctggaaccggaggacttcgcggtttattattgccaacagtatggttcttctccgtggacctttggtcaaggcactaaagttgaaattaaataatcgccgtaacctgattaactgagactgacggcaacgccaaattgcctgatgcgctgcgcttatcaggcctacaaggggaattgcaatttattgaatttgcacatttttgtaggccggataaggcgtttacgccgcatccggcaacatgaatggtaatttgccagcaacgtgcttccccgccaacggcggggttttttctg

SEQ ID NO: 767 - protein, 242 aa, Artificial Sequence
  Description of Artificial Sequence: Synthetic polypeptide
MEIVLTQSPGTLSLSPGERATLSCRASQSVGSSYLAWYQQKPGQAPRLLIYGAFSRATGIPDRFSGSGSGTDFTLTISRLEPEDFAVYYCQQYGSSPWTFGQGTKVEIKGGGSGGGSGGGSGGGQVQLVESGGGVVQPGRSLRLSCAASGFTFSSYTMHWVRQAPGKGLEWVTFISYDGNNKYYADSVKGRFTISRDNSKNTLYLQMNSLRAEDTAIYYCARTGWLGPFDYWGQGTLVTVSS

SEQ ID NO: 768 - DNA, 1103 bp, Artificial Sequence
  Description of Artificial Sequence: Synthetic polynucleotide
agcgggaataaggggcagagaaaagagtatttcgtcgactaacaaaaaatggctgtttgtgaaaaaaattctaaaggttgttttacgacagacgataacagggttgacggcgattgagccgacgggtggaaacccaaaacgtaatcaacagattataaggagttaaatagaaaaatggagattgtactgacccagagccctggtacattgtctttgtcgcctggtgaacgcgcgactctgtcttgtcgtgcgtctcagtctgttggtagttcgtatctggcgtggtatcaacaaaaaccgggccaagctccgcgtctgctgatttacggtgcatttagccgcgcgactggcattccggaccgcttttctgggtctggctcaggtaccgattttactctgactatttcgcgtctggagccggaggatttcgcggtttattactgccagcaatatggttctagtccgtggaccttcggccaaggtactaaagtggaaatcaaaggcgggggttcgggtggtggctctgggggtggctcgggcggtgggcaggtgcaactggttgagagtggtggcggcgttgttcaaccgggccgctctctgcgcctgtcgtgcgctgcttctggctttacctttagctcttatacgatgcactgggttcgccaagctccgggtaaaggtctggagtgggtgactttcatttcttacgatggtaacaacaaatattatgctgattctgttaaaggccgttttactatttctcgagacaatagcaaaaacactctgtacctgcagatgaattctctgcgcgctgaagacaccgcgatttattattgtgcgcgcactggttggctgggtccgtttgattattggggtcagggcacgctggttactgttagctcgtgatcgccgtaacctgattaactgagactgacggcaacgccaaattgcctgatgcgctgcgcttatcaggcctacaaggggaattgcaatttattgaatttgcacatttttgtaggccggataaggcgtttacgccgcatccggcaacatgaatggtaatttgccagcaacgtgcttccccgccaacggcggggttttttctg

SEQ ID NO: 769 - protein, 236 aa, Artificial Sequence
  Description of Artificial Sequence: Synthetic polypeptide
MQVQLVESGGGVVQPGRSLRLDCKASGITFSNSGMHWVRQAPGKGLEWVAVIWYDGSKRYYADSVKGRFTISRDNSKNTLFLQMNSLRAEDTAVYYCATNDDYWGQGTLVTVSSGGGSGGGSGGGSGGGEIVLTQSPATLSLSPGERATLSCRASQSVSSYLAWYQQKPGQAPRLLIYDASNRATGIPARFSGSGSGTDFTLTISSLEPEDFAVYYCQQSSNWPRTFGQGTKVEIK

SEQ ID NO: 770 - DNA, 1095 bp, Artificial Sequence
  Description of Artificial Sequence: Synthetic polynucleotide
agcgggaataaggggcagagaaaagagtatttcgtcgactaacaaaaaatggctgtttgtgaaaaaaattctaaaggttgttttacgacagacgataacagggttgacggcgattgagccgacgggtggaaacccaaaacgtaatcaacctcaaagaattataggaaaggaggaagcgataagtatgcaggtgcaattggtggagtcgggtggcggcgtggtgcaaccgggtcgtagcctgcgcctggattgtaaagcgtcaggcatcacgtttagcaattctggcatgcactgggtgcgtcaagcgccgggcaaaggtctggagtgggttgcggtaatttggtacgatggttctaaacgctattacgcggatagtgtgaaaggtcgctttactatctctcgcgataattctaaaaacaccctgtttctgcaaatgaattcgttgcgtgcggaagatactgcggtatattattgtgctactaacgatgattattggggtcaaggcaccctggtgactgtttcgagcggcggtggtagcggcggcggctctggtggtggttctggtggcggtgagattgtgctgactcaaagcccggcgaccctgtctctgtcgccgggtgaacgcgctactctgagttgccgtgcgtcgcaaagcgtgtcttcttatctggcgtggtaccaacaaaaaccgggtcaagcgccgcgcctgctgatatatgatgctagtaatcgtgcaacgggtattccggcacgcttttcaggttctggcagcggcaccgatttcactctgactatctcgtcactggagccggaagactttgcggtttattattgtcagcaatcttctaattggccgcgtacgtttggtcagggcactaaagttgaaatcaaataatcgccgtaacctgattaactgagactgacggcaacgccaaattgcctgatgcgctgcgcttatcaggcctacaaggggaattgcaatttattgaatttgcacatttttgtaggccggataaggcgtttacgccgcatccggcaacatgaatggtaatttgccagcaacgtgcttccccgccaacggcggggttttttctg

SEQ ID NO: 771 - protein, 236 aa, Artificial Sequence
  Description of Artificial Sequence: Synthetic polypeptide
MEIVLTQSPATLSLSPGERATLSCRASQSVSSYLAWYQQKPGQAPRLLIYDASNRATGIPARFSGSGSGTDFTLTISSLEPEDFAVYYCQQSSNWPRTFGQGTKVEIKGGGSGGGSGGGSGGGQVQLVESGGGVVQPGRSLRLDCKASGITFSNSGMHWVRQAPGKGLEWVAVIWYDGSKRYYADSVKGRFTISRDNSKNTLFLQMNSLRAEDTAVYYCATNDDYWGQGTLVTVSS

SEQ ID NO: 772 - DNA, 1085 bp, Artificial Sequence
  Description of Artificial Sequence: Synthetic polynucleotide
agcgggaataaggggcagagaaaagagtatttcgtcgactaacaaaaaatggctgtttgtgaaaaaaattctaaaggttgttttacgacagacgataacagggttgacggcgattgagccgacgggtggaaacccaaaacgtaatcaacatcaccaatttgaggaaaggtaaatatggaaatcgttttaacgcagtcgccggcgactctgtctttgtcgcctggtgaacgtgctacgctgtcttgccgcgcgtcacagtctgtgtcgtcatatctggcttggtaccaacagaaaccgggccaagctccgcgcctgctgatttatgatgcgtctaatcgcgcgaccggcattccggcgcgtttttctggctccggctctggcaccgactttactctgactatttcgtctctggaaccggaagattttgcggtgtactattgccagcaatcttctaattggccgcgcacgtttggtcaaggtaccaaggttgagatcaaaggtggtggctcgggcggcggttcgggcggcggctcaggtggtggccaagttcagttggttgagtctggcgggggcgtagtacaaccgggtcgttctttgcgtctggattgcaaagcgagcggtattacctttagcaattcaggtatgcactgggtgcgccaagcgccgggcaaaggcctggaatgggttgcggtgatttggtacgatggctcgaaacgttattatgctgacagcgttaaaggtcgttttactattagccgtgataattccaaaaatacgctgtttctgcagatgaatagcctgcgtgctgaagacactgcggtttattactgtgctactaatgatgattactggggccagggcaccctggtgactgtgagttcttaatcgccgtaacctgattaactgagactgacggcaacgccaaattgcctgatgcgctgcgcttatcaggcctacaaggggaattgcaatttattgaatttgcacatttttgtaggccggataaggcgtttacgccgcatccggcaacatgaatggtaatttgccagcaacgtgcttccccgccaacggcggggttttttctg

SEQ ID NO: 773 - protein, 242 aa, Artificial Sequence
  Description of Artificial Sequence: Synthetic polypeptide
MEVQLVESGGGLVQPGGSLRLSCAASGFTFSDSWIHWVRQAPGKGLEWVAWISPYGGSTYYADSVKGRFTISADTSKNTAYLQMNSLRAEDTAVYYCARRHWPGGFDYWGQGTLVTVSSGGGSGGGSGGGSGGGDIQMTQSPSSLSASVGDRVTITCRASQDVSTAVAWYQQKPGKAPKLLIYSASFLYSGVPSRFSGSGSGTDFTLTISSLQPEDFATYYCQQYLYHPATFGQGTKVEIKR

SEQ ID NO: 774 - DNA, 1103 bp, Artificial Sequence
  Description of Artificial Sequence: Synthetic polynucleotide
agcgggaataaggggcagagaaaagagtatttcgtcgactaacaaaaaatggctgtttgtgaaaaaaattctaaaggttgttttacgacagacgataacagggttgacggcgattgagccgacgggtggaaacccaaaacgtaatcaactacataattttggggagggtactcgatggaagttcagctggtggagagtggtggcggtctggtgcagccgggcggctctctgcgtctgagctgtgcggcgtctggctttacgttttctgacagttggattcactgggtgcgccaagcaccgggcaaaggcctggagtgggtggcgtggatttctccgtatggcggtagtacttattatgctgattctgtgaaaggccgttttaccatttcggcggacacttcaaaaaataccgcgtatctgcaaatgaatagcctgcgcgctgaagacacggctgtttactactgtgctcgccgccactggccgggcggtttcgattattggggccaaggcactctggtgactgtgagctctggcggcgggtcgggtggcggttctggcggtggcagtggcggtggtgatattcaaatgacccaatctccgtcgtctctgagcgcgtctgtgggcgatcgtgtaaccattacttgtcgtgcgtcgcaggatgtgtctactgctgtggcgtggtatcagcaaaaaccgggtaaagctccgaaactgctgatttatagcgcttcttttctgtatagtggtgttccgtcacgttttagcggttcaggctctggtactgatttcacactgactatttcttctctgcaaccggaagatttcgcgacttattattgtcagcagtacttgtaccacccggcaacttttggtcagggcactaaagttgaaattaaacgttaatcgccgtaacctgattaactgagactgacggcaacgccaaattgcctgatgcgctgcgcttatcaggcctacaaggggaattgcaatttattgaatttgcacatttttgtaggccggataaggcgtttacgccgcatccggcaacatgaatggtaatttgccagcaacgtgcttccccgccaacggcggggttttttctg

SEQ ID NO: 775 - protein, 242 aa, Artificial Sequence
  Description of Artificial Sequence: Synthetic polypeptide
MDIQMTQSPSSLSASVGDRVTITCRASQDVSTAVAWYQQKPGKAPKLLIYSASFLYSGVPSRFSGSGSGTDFTLTISSLQPEDFATYYCQQYLYHPATFGQGTKVEIKRGGGSGGGSGGGSGGGEVQLVESGGGLVQPGGSLRLSCAASGFTFSDSWIHWVRQAPGKGLEWVAWISPYGGSTYYADSVKGRFTISADTSKNTAYLQMNSLRAEDTAVYYCARRHWPGGFDYWGQGTLVTVSS

SEQ ID NO: 776 - DNA, 1103 bp, Artificial Sequence
  Description of Artificial Sequence: Synthetic polynucleotide
agcgggaataaggggcagagaaaagagtatttcgtcgactaacaaaaaatggctgtttgtgaaaaaaattctaaaggttgttttacgacagacgataacagggttgacggcgattgagccgacgggtggaaacccaaaacgtaatcaactggcagacgcctaaggaggaagaccatggatattcagatgactcagagccctagctcactgtctgcgtcagttggcgatcgtgtgactattacctgtcgcgctagtcaggatgtgtctacggcggttgcgtggtatcaacagaaaccgggcaaagctccgaaactgttgatttattcagcgtctttcctgtattcgggtgtgccttctcgcttttcgggctctggtagcggtactgattttacgctgactattagttcactgcaaccggaggactttgcgacttattattgccaacaatacctgtatcacccggcgacctttggtcaaggcactaaagtggaaattaaacgcggcggcggcagcggtggcggctctggtggtgggtctggtggtggtgaggttcagctggttgagtctggtggtggtctggttcaacctgggggcagcctgcgcctgtcgtgcgcggcgtctggttttacgttctcagattcttggattcactgggtacgtcaagctccgggcaaaggtctggagtgggtggcgtggatttctccgtatggcggttcgacgtattacgcggactctgttaaagggcgttttacgatctcagcggatacttctaaaaatactgcgtatctgcaaatgaattctctgcgagcggaggataccgcggtgtattactgtgctcgccgccactggcctggtggtttcgattattggggtcaaggtaccctggtgactgtttcgtcttaatcgccgtaacctgattaactgagactgacggcaacgccaaattgcctgatgcgctgcgcttatcaggcctacaaggggaattgcaatttattgaatttgcacatttttgtaggccggataaggcgtttacgccgcatccggcaacatgaatggtaatttgccagcaacgtgcttccccgccaacggcggggttttttctg

SEQ ID NO: 777 - protein, 606 aa, Artificial Sequence
  Description of Artificial Sequence: Synthetic polypeptide
MNKVYSLKYCPVTGGLIVVSELASRVIKKTCRRLTHILLAGIPAVYLYYPQISQAGIVRQVQLVESGGGVVQPGRSLRLSCAASGFTFSSYTMHWVRQAPGKGLEWVTFISYDGNNKYYADSVKGRFTISRDNSKNTLYLQMNSLRAEDTAIYYCARTGWLGPFDYWGQGTLVTVSSGGGSGGGSGGGSGGGEIVLTQSPGTLSLSPGERATLSCRASQSVGSSYLAWYQQKPGQAPRLLIYGAFSRATGIPDRFSGSGSGTDFTLTISRLEPEDFAVYYCQQYGSSPWTFGQGTKVEIKFKAEADKAAAAKADSFMNAGYKNFMTEVNNLNKRMGDLRDTNGDAGAWARIMSGAGSADGGYSDNYTHVQVGFDKKHELDGVDLFTGVTMTYTDSSADSHAFSGKTKSVGGGLYASALFESGAYIDLIGKYIHHDNDYTGNFAGLGTKHYNTHSWYAGAETGYRYHLTEETFIEPQAELVYGAVSGKTFRWKDGDMDLSMKNRDFSPLIGRTGIELGKTFSGKDWSVTARAGTSWQFDLLNNGETVLRDASGEKRIKGEKDSRMLFNVGMNAQIKDNMRFGLEFEKSAFGKYNVDNAVNANFRYMF

SEQ ID NO: 778 - DNA, 2038 bp, Artificial Sequence
  Description of Artificial Sequence: Synthetic polynucleotide
atctaatctagacatcattaattcctaatttttgttgacactctatcattgatagagttattttaccactccctatcagtgatagagaaaagtgaattaaatatcaactagaggtcaccaaatgaacaaagtatatagcctgaaatattgcccagtaactgggggtctgattgtagtcagtgaactggcatcccgcgtcatcaaaaaaacctgccgtcgtctgactcacatcctgctggcgggtattccggctgtgtatctgtactacccgcagatctcccaggcaggtatcgtccgccaggtacaattagttgagagcggcggcggtgtggttcaaccgggccgtagtctgcgattgtcttgtgctgcatctggttttactttcagttcttacacgatgcactgggttcgccaagctccgggcaaaggcctggagtgggttacctttatttcttacgatggcaataataagtattacgctgattctgtgaaaggtcgctttactattagccgagataactctaaaaatactctgtatctgcaaatgaattctctgcgtgcggaagatactgcgatctattattgtgcgcgtactggttggctgggcccgtttgattattggggccaaggcacgctggttactgttagttcgggcggcggttctggtggcggctctggtggtggctctggcggcggcgagattgtgctgactcaatctccgggcacgctgtcactgtctccgggtgaacgcgcgaccctgtcttgtcgcgcgagtcaaagtgttggttcttcttatctggcttggtatcagcaaaagcctggtcaagcgccgcgtctgttgatttatggcgcgttttcgcgcgcgactggcattccggaccgattttctggttctggttctggcactgatttcactctgaccatttcacgcctggaaccggaggattttgcggtgtactattgccaacaatatggctcatcgccgtggacgtttggccaaggtactaaagttgagattaaattcaaagcggaggctgacaaggccgctgcagcaaaagctgactcctttatgaacgcgggttacaaaaacttcatgaccgaggtaaataatctcaataaacgtatgggtgatctgcgcgacactaatggggatgcaggcgcatgggcacgcattatgtctggtgcaggttcggcggatggcgggtattctgacaattacactcatgttcaggtgggcttcgataaaaaacatgagctggacggtgtggatctgttcactggcgtaaccatgacttatactgattcaagcgcagacagccacgcattttcaggtaaaacgaaatcagttggcggcggtctgtatgcgagcgcactgttcgagagcggcgcctacattgatctaattggcaagtatattcaccatgataatgattacacagggaactttgcaggcctgggcaccaaacactataacacgcattcatggtacgctggcgcagaaaccggctatagataccacctgaccgaggaaacctttatcgaaccgcaagcggaactggtttacggtgcggtcagtggcaagacctttcgttggaaagatggtgatatggatctgtcaatgaaaaaccgcgacttcagccccttgatcggccgcaccggcattgagctgggcaaaaccttctctggcaaagattggtctgttaccgcgcgtgcgggcacttcgtggcaatttgatctgctaaacaacggtgagactgtactgcgtgatgcgagtggcgaaaaacgtattaaaggtgaaaaagatagtagaatgctattcaacgtgggcatgaatgcgcagatcaaagataacatgcgttttgggttggagtttgaaaaatccgcgttcggtaaatataatgttgacaatgctgtgaacgcgaatttccgctacatgttttaactctaacggacttgagtgaggttgtaaagggagttggctcctcggtaccaaattccagaaaagaggcctcccgaaaggggggccttttttcgtttt

SEQ ID NO: 779 - protein, 606 aa, Artificial Sequence
  Description of Artificial Sequence: Synthetic polypeptide
MNKVYSLKYCPVTGGLIVVSELASRVIKKTCRRLTHILLAGIPAVYLYYPQISQAGIVREIVLTQSPGTLSLSPGERATLSCRASQSVGSSYLAWYQQKPGQAPRLLIYGAFSRATGIPDRFSGSGSGTDFTLTISRLEPEDFAVYYCQQYGSSPWTFGQGTKVEIKGGGSGGGSGGGSGGGQVQLVESGGGVVQPGRSLRLSCAASGFTFSSYTMHWVRQAPGKGLEWVTFISYDGNNKYYADSVKGRFTISRDNSKNTLYLQMNSLRAEDTAIYYCARTGWLGPFDYWGQGTLVTVSSFKAEADKAAAAKADSFMNAGYKNFMTEVNNLNKRMGDLRDTNGDAGAWARIMSGAGSADGGYSDNYTHVQVGFDKKHELDGVDLFTGVTMTYTDSSADSHAFSGKTKSVGGGLYASALFESGAYIDLIGKYIHHDNDYTGNFAGLGTKHYNTHSWYAGAETGYRYHLTEETFIEPQAELVYGAVSGKTFRWKDGDMDLSMKNRDFSPLIGRTGIELGKTFSGKDWSVTARAGTSWQFDLLNNGETVLRDASGEKRIKGEKDSRMLFNVGMNAQIKDNMRFGLEFEKSAFGKYNVDNAVNANFRYMF

SEQ ID NO: 780 - DNA, 2038 bp, Artificial Sequence
  Description of Artificial Sequence: Synthetic polynucleotide
atctaatctagacatcattaattcctaatttttgttgacactctatcattgatagagttattttaccactccctatcagtgatagagaaaagtgaattaaatatcaactagaggtcaccaaatgaacaaagtatatagcctgaaatattgcccagtaactgggggtctgattgtagtcagtgaactggcatcccgcgtcatcaaaaaaacctgccgtcgtctgactcacatcctgctggcgggtattccggctgtgtatctgtactacccgcagatctcccaggcaggtatcgtccgcgaaattgtactgacccagtcgcctggtaccctgtctctgtcgccgggtgaacgtgctaccctgtcttgtcgtgcttcgcaatcggttggctcgtcttatctggcatggtatcagcaaaaaccgggccaagcgcctcgtctgctgatttatggcgcgttttctcgtgctacgggcattcctgatcgtttttcgggctctggctctggtactgattttacgctgactatcagccgcttggaacctgaagattttgcggtttattattgccaacaatatggctcttctccgtggacgtttggtcaaggcactaaagttgaaattaaaggtggtggctcgggcggtggttctggtggtggtagtggtggtggtcaagtgcagttggttgaatcgggtggcggtgttgtgcagccgggccgttcgttgcgtctgtcttgcgcagcgagtggtttcaccttctcttcttatactatgcactgggtgcgtcaagcacctggcaaaggtctggagtgggtaacttttatttcatacgatggtaataataaatattatgcagattctgttaaaggtcgctttacgatttctcgcgataattcaaaaaatacgctgtatctgcagatgaattcgctgcgcgctgaggatactgcgatctactattgtgcgcgtactggttggctgggtccgtttgattactggggccaaggtacgctggttacagtttcgtcgttcaaagcggaggctgacaaggccgctgcagcaaaagctgactcctttatgaacgcgggttacaaaaacttcatgaccgaggtaaataatctcaataaacgtatgggtgatctgcgcgacactaatggggatgcaggcgcatgggcacgcattatgtctggtgcaggttcggcggatggcgggtattctgacaattacactcatgttcaggtgggcttcgataaaaaacatgagctggacggtgtggatctgttcactggcgtaaccatgacttatactgattcaagcgcagacagccacgcattttcaggtaaaacgaaatcagttggcggcggtctgtatgcgagcgcactgttcgagagcggcgcctacattgatctaattggcaagtatattcaccatgataatgattacacagggaactttgcaggcctgggcaccaaacactataacacgcattcatggtacgctggcgcagaaaccggctatagataccacctgaccgaggaaacctttatcgaaccgcaagcggaactggtttacggtgcggtcagtggcaagacctttcgttggaaagatggtgatatggatctgtcaatgaaaaaccgcgacttcagccccttgatcggccgcaccggcattgagctgggcaaaaccttctctggcaaagattggtctgttaccgcgcgtgcgggcacttcgtggcaatttgatctgctaaacaacggtgagactgtactgcgtgatgcgagtggcgaaaaacgtattaaaggtgaaaaagatagtagaatgctattcaacgtgggcatgaatgcgcagatcaaagataacatgcgttttgggttggagtttgaaaaatccgcgttcggtaaatataatgttgacaatgctgtgaacgcgaatttccgctacatgttttaactctaacggacttgagtgaggttgtaaagggagttggctcctcggtaccaaattccagaaaagaggcctcccgaaaggggggccttttttcgtttt

SEQ ID NO: 781 - protein, 600 aa, Artificial Sequence
  Description of Artificial Sequence: Synthetic polypeptide
MNKVYSLKYCPVTGGLIVVSELASRVIKKTCRRLTHILLAGIPAVYLYYPQISQAGIVRQVQLVESGGGVVQPGRSLRLDCKASGITFSNSGMHWVRQAPGKGLEWVAVIWYDGSKRYYADSVKGRFTISRDNSKNTLFLQMNSLRAEDTAVYYCATNDDYWGQGTLVTVSSGGGSGGGSGGGSGGGEIVLTQSPATLSLSPGERATLSCRASQSVSSYLAWYQQKPGQAPRLLIYDASNRATGIPARFSGSGSGTDFTLTISSLEPEDFAVYYCQQSSNWPRTFGQGTKVEIKFKAEADKAAAAKADSFMNAGYKNFMTEVNNLNKRMGDLRDTNGDAGAWARIMSGAGSADGGYSDNYTHVQVGFDKKHELDGVDLFTGVTMTYTDSSADSHAFSGKTKSVGGGLYASALFESGAYIDLIGKYIHHDNDYTGNFAGLGTKHYNTHSWYAGAETGYRYHLTEETFIEPQAELVYGAVSGKTFRWKDGDMDLSMKNRDFSPLIGRTGIELGKTFSGKDWSVTARAGTSWQFDLLNNGETVLRDASGEKRIKGEKDSRMLFNVGMNAQIKDNMRFGLEFEKSAFGKYNVDNAVNANFRYMF

SEQ ID NO: 782 - DNA, 2020 bp, Artificial Sequence
  Description of Artificial Sequence: Synthetic polynucleotide
atctaatctagacatcattaattcctaatttttgttgacactctatcattgatagagttattttaccactccctatcagtgatagagaaaagtgaattaaatatcaactagaggtcaccaaatgaacaaagtatatagcctgaaatattgcccagtaactgggggtctgattgtagtcagtgaactggcatcccgcgtcatcaaaaaaacctgccgtcgtctgactcacatcctgctggcgggtattccggctgtgtatctgtactacccgcagatctcccaggcaggtatcgtccgccaagtacaactggttgaatccggcggaggagtggtgcaaccgggccgcagtttgcgtctggattgtaaagcttcaggcatcactttttctaattctggtatgcactgggttcgccaagctccgggtaaaggtctggagtgggttgcggtgatctggtatgatggttctaaacgatattatgcggatagtgttaagggtcgttttactatttctcgtgataattctaagaacaccttgtttctgcagatgaatagtctgcgcgctgaggatactgcggtatattattgtgcgactaatgacgattattggggccaaggcacgctggttaccgtgagctctggtggtggttcgggtggtggttctggtggtgggagcggcggtggcgagatcgttctgactcaaagcccggcgactctgagtctgagtccgggtgaacgtgcgactctgagctgccgtgcgtctcagagtgtgtcgagttatctggcgtggtaccaacaaaaaccgggccaggcgccgcgactgctgatttatgatgcttctaatcgtgcgactggtattccggcgcgctttagcggttctggctcaggcactgacttcactctgactatttcttcgctggaaccggaagattttgcggtgtactattgtcaacaatcatctaattggcctcgtacgttcggtcaaggtacaaaagtggagataaaattcaaagcggaggctgacaaggccgctgcagcaaaagctgactcctttatgaacgcgggttacaaaaacttcatgaccgaggtaaataatctcaataaacgtatgggtgatctgcgcgacactaatggggatgcaggcgcatgggcacgcattatgtctggtgcaggttcggcggatggcgggtattctgacaattacactcatgttcaggtgggcttcgataaaaaacatgagctggacggtgtggatctgttcactggcgtaaccatgacttatactgattcaagcgcagacagccacgcattttcaggtaaaacgaaatcagttggcggcggtctgtatgcgagcgcactgttcgagagcggcgcctacattgatctaattggcaagtatattcaccatgataatgattacacagggaactttgcaggcctgggcaccaaacactataacacgcattcatggtacgctggcgcagaaaccggctatagataccacctgaccgaggaaacctttatcgaaccgcaagcggaactggtttacggtgcggtcagtggcaagacctttcgttggaaagatggtgatatggatctgtcaatgaaaaaccgcgacttcagccccttgatcggccgcaccggcattgagctgggcaaaaccttctctggcaaagattggtctgttaccgcgcgtgcgggcacttcgtggcaatttgatctgctaaacaacggtgagactgtactgcgtgatgcgagtggcgaaaaacgtattaaaggtgaaaaagatagtagaatgctattcaacgtgggcatgaatgcgcagatcaaagataacatgcgttttgggttggagtttgaaaaatccgcgttcggtaaatataatgttgacaatgctgtgaacgcgaatttccgctacatgttttaactctaacggacttgagtgaggttgtaaagggagttggctcctcggtaccaaattccagaaaagaggcctcccgaaaggggggccttttttcgtttt

SEQ ID NO: 783 - protein, 600 aa, Artificial Sequence
  Description of Artificial Sequence: Synthetic polypeptide
MNKVYSLKYCPVTGGLIVVSELASRVIKKTCRRLTHILLAGIPAVYLYYPQISQAGIVREIVLTQSPATLSLSPGERATLSCRASQSVSSYLAWYQQKPGQAPRLLIYDASNRATGIPARFSGSGSGTDFTLTISSLEPEDFAVYYCQQSSNWPRTFGQGTKVEIKGGGSGGGSGGGSGGGQVQLVESGGGVVQPGRSLRLDCKASGITFSNSGMHWVRQAPGKGLEWVAVIWYDGSKRYYADSVKGRFTISRDNSKNTLFLQMNSLRAEDTAVYYCATNDDYWGQGTLVTVSSFKAEADKAAAAKADSFMNAGYKNFMTEVNNLNKRMGDLRDTNGDAGAWARIMSGAGSADGGYSDNYTHVQVGFDKKHELDGVDLFTGVTMTYTDSSADSHAFSGKTKSVGGGLYASALFESGAYIDLIGKYIHHDNDYTGNFAGLGTKHYNTHSWYAGAETGYRYHLTEETFIEPQAELVYGAVSGKTFRWKDGDMDLSMKNRDFSPLIGRTGIELGKTFSGKDWSVTARAGTSWQFDLLNNGETVLRDASGEKRIKGEKDSRMLFNVGMNAQIKDNMRFGLEFEKSAFGKYNVDNAVNANFRYMF

SEQ ID NO: 784 - DNA, 2020 bp, Artificial Sequence
  Description of Artificial Sequence: Synthetic polynucleotide
atctaatctagacatcattaattcctaatttttgttgacactctatcattgatagagttattttaccactccctatcagtgatagagaaaagtgaattaaatatcaactagaggtcaccaaatgaacaaagtatatagcctgaaatattgcccagtaactgggggtctgattgtagtcagtgaactggcatcccgcgtcatcaaaaaaacctgccgtcgtctgactcacatcctgctggcgggtattccggctgtgtatctgtactacccgcagatctcccaggcaggtatcgtccgcgaaatcgtgctgactcagagtccggcgactctgtctctgagtccgggcgaacgcgcgactctgtcttgccgtgcgtctcaatctgtgtcttcatacttggcttggtaccaacaaaaaccgggccaggcgccgcgactgttgatttatgatgcgtcgaatcgcgcgactggcattccggcgcgcttttcgggtagcggttctggtactgattttacgctgactatctcttctctggagcctgaagatttcgctgtttattactgccaacagtctagtaattggccgcgtactttcggccagggcactaaggtggaaattaaaggtggcggctcgggcggcggctcgggtggtggttctggtggtggccaagtgcaactggtggaaagtggcggcggggtggtgcaaccgggccgttctctgcgcctggattgtaaagcttcaggcattacttttagcaactctggtatgcactgggttcgccaagctccgggcaaaggcctggaatgggtggcggttatttggtacgatggctctaaacgttattacgctgacagtgttaaaggccgctttaccatttctcgtgataattctaaaaataccctgtttctgcaaatgaactcgctgcgcgcggaagatactgctgtttactattgtgcgactaatgatgattactggggtcaaggtaccctggttaccgtgtcttctttcaaagcggaggctgacaaggccgctgcagcaaaagctgactcctttatgaacgcgggttacaaaaacttcatgaccgaggtaaataatctcaataaacgtatgggtgatctgcgcgacactaatggggatgcaggcgcatgggcacgcattatgtctggtgcaggttcggcggatggcgggtattctgacaattacactcatgttcaggtgggcttcgataaaaaacatgagctggacggtgtggatctgttcactggcgtaaccatgacttatactgattcaagcgcagacagccacgcattttcaggtaaaacgaaatcagttggcggcggtctgtatgcgagcgcactgttcgagagcggcgcctacattgatctaattggcaagtatattcaccatgataatgattacacagggaactttgcaggcctgggcaccaaacactataacacgcattcatggtacgctggcgcagaaaccggctatagataccacctgaccgaggaaacctttatcgaaccgcaagcggaactggtttacggtgcggtcagtggcaagacctttcgttggaaagatggtgatatggatctgtcaatgaaaaaccgcgacttcagccccttgatcggccgcaccggcattgagctgggcaaaaccttctctggcaaagattggtctgttaccgcgcgtgcgggcacttcgtggcaatttgatctgctaaacaacggtgagactgtactgcgtgatgcgagtggcgaaaaacgtattaaaggtgaaaaagatagtagaatgctattcaacgtgggcatgaatgcgcagatcaaagataacatgcgttttgggttggagtttgaaaaatccgcgttcggtaaatataatgttgacaatgctgtgaacgcgaatttccgctacatgttttaactctaacggacttgagtgaggttgtaaagggagttggctcctcggtaccaaattccagaaaagaggcctcccgaaaggggggccttttttcgtttt

SEQ ID NO: 785 - protein, 606 aa, Artificial Sequence
  Description of Artificial Sequence: Synthetic polypeptide
MNKVYSLKYCPVTGGLIVVSELASRVIKKTCRRLTHILLAGIPAVYLYYPQISQAGIVRDIQMTQSPSSLSASVGDRVTITCRASQDVSTAVAWYQQKPGKAPKLLIYSASFLYSGVPSRFSGSGSGTDFTLTISSLQPEDFATYYCQQYLYHPATFGQGTKVEIKRGGGSGGGSGGGSGGGEVQLVESGGGLVQPGGSLRLSCAASGFTFSDSWIHWVRQAPGKGLEWVAWISPYGGSTYYADSVKGRFTISADTSKNTAYLQMNSLRAEDTAVYYCARRHWPGGFDYWGQGTLVTVSSFKAEADKAAAAKADSFMNAGYKNFMTEVNNLNKRMGDLRDTNGDAGAWARIMSGAGSADGGYSDNYTHVQVGFDKKHELDGVDLFTGVTMTYTDSSADSHAFSGKTKSVGGGLYASALFESGAYIDLIGKYIHHDNDYTGNFAGLGTKHYNTHSWYAGAETGYRYHLTEETFIEPQAELVYGAVSGKTFRWKDGDMDLSMKNRDFSPLIGRTGIELGKTFSGKDWSVTARAGTSWQFDLLNNGETVLRDASGEKRIKGEKDSRMLFNVGMNAQIKDNMRFGLEFEKSAFGKYNVDNAVNANFRYMF

SEQ ID NO: 786 - DNA, 2038 bp, Artificial Sequence
  Description of Artificial Sequence: Synthetic polynucleotide
atctaatctagacatcattaattcctaatttttgttgacactctatcattgatagagttattttaccactccctatcagtgatagagaaaagtgaattaaatatcaactagaggtcaccaaatgaacaaagtatatagcctgaaatattgcccagtaactgggggtctgattgtagtcagtgaactggcatcccgcgtcatcaaaaaaacctgccgtcgtctgactcacatcctgctggcgggtattccggctgtgtatctgtactacccgcagatctcccaggcaggtatcgtccgcgaagtgcagctggtggagtcaggtggaggcttggtgcaaccgggcggttcactgcgtctgtcatgtgcggcgtctgggtttacttttagtgactcttggattcactgggtgcgccaggctccgggtaaaggcctggaatgggtagcttggattagtccttacggtggctcgacctattatgctgattcggtaaagggtcgctttactattagcgctgatacttctaaaaatactgcatacctgcagatgaatagcctgcgcgctgaggatactgctgtgtattattgcgcgcgtcgccactggccgggcggctttgattattggggccaaggtactctggttaccgtgtctagtggcggtggtagcggcggcggctcaggtggcggctcgggcggtggcgacattcagatgactcagtctccgtcttctttgtcggcgagcgtgggcgatcgtgttaccatcacgtgtcgcgcgagccaagatgtgtcgactgcggtggcttggtatcaacaaaaaccgggtaaagctccgaaactgctgatttatagtgcgtcttttttgtattctggtgttccgtctcgtttctctggctcaggtagcggtactgattttacgctgactatttcttcactgcaaccggaagattttgctacgtattattgtcaacaatatctgtatcacccggcgacgtttggtcagggtactaaggtggagataaaacgcttcaaagcggaggctgacaaggccgctgcagcaaaagctgactcctttatgaacgcgggttacaaaaacttcatgaccgaggtaaataatctcaataaacgtatgggtgatctgcgcgacactaatggggatgcaggcgcatgggcacgcattatgtctggtgcaggttcggcggatggcgggtattctgacaattacactcatgttcaggtgggcttcgataaaaaacatgagctggacggtgtggatctgttcactggcgtaaccatgacttatactgattcaagcgcagacagccacgcattttcaggtaaaacgaaatcagttggcggcggtctgtatgcgagcgcactgttcgagagcggcgcctacattgatctaattggcaagtatattcaccatgataatgattacacagggaactttgcaggcctgggcaccaaacactataacacgcattcatggtacgctggcgcagaaaccggctatagataccacctgaccgaggaaacctttatcgaaccgcaagcggaactggtttacggtgcggtcagtggcaagacctttcgttggaaagatggtgatatggatctgtcaatgaaaaaccgcgacttcagccccttgatcggccgcaccggcattgagctgggcaaaaccttctctggcaaagattggtctgttaccgcgcgtgcgggcacttcgtggcaatttgatctgctaaacaacggtgagactgtactgcgtgatgcgagtggcgaaaaacgtattaaaggtgaaaaagatagtagaatgctattcaacgtgggcatgaatgcgcagatcaaagataacatgcgttttgggttggagtttgaaaaatccgcgttcggtaaatataatgttgacaatgctgtgaacgcgaatttccgctacatgttttaactctaacggacttgagtgaggttgtaaagggagttggctcctcggtaccaaattccagaaaagaggcctcccgaaaggggggccttttttcgtttt

SEQ ID NO: 787 - protein, 600 aa, Artificial Sequence; identical to SEQ ID NO: 783
  Description of Artificial Sequence: Synthetic polypeptide

SEQ ID NO: 788 - DNA, 2038 bp, Artificial Sequence
  Description of Artificial Sequence: Synthetic polynucleotide
atctaatctagacatcattaattcctaatttttgttgacactctatcattgatagagttattttaccactccctatcagtgatagagaaaagtgaattaaatatcaactagaggtcaccaaatgaacaaagtatatagcctgaaatattgcccagtaactgggggtctgattgtagtcagtgaactggcatcccgcgtcatcaaaaaaacctgccgtcgtctgactcacatcctgctggcgggtattccggctgtgtatctgtactacccgcagatctcccaggcaggtatcgtccgcgatattcaaatgactcaatctccgagctctctgagtgcgtctgtgggtgatcgtgtgactattacttgtcgtgcgtctcaagatgtttcaactgcggttgcgtggtatcaacagaaaccgggcaaggcgcctaagctgctgatttattctgcttcgttcctgtacagcggtgtgccgtctcgtttctctggctctggttcgggtactgatttcactctgactatttcgagtctgcagccggaagattttgcgacttattattgtcaacaatatctgtatcaccctgcgacgtttggtcaaggcacgaaagttgaaattaaacgtggtggtggctctggtggtggcagcggtggtgggtcgggtggcggtgaagttcaactggttgagtcaggtggtggcctggtgcaaccgggcggctctctgcgcctgtcttgtgctgcgtcgggttttacgttctctgatagctggattcactgggtacgccaggcaccgggcaaaggtctggaatgggtagcttggatttcaccttatggtggctctacttattacgcggatagcgtgaaaggtcgctttactatttctgcggacactagcaaaaatactgcttacctgcaaatgaattcgctgcgtgctgaggatactgcagtgtattactgtgcgcgtcgtcattggcctggcggctttgattattggggtcaaggtactctggttactgttagcagcttcaaagcggaggctgacaaggccgctgcagcaaaagctgactcctttatgaacgcgggttacaaaaacttcatgaccgaggtaaataatctcaataaacgtatgggtgatctgcgcgacactaatggggatgcaggcgcatgggcacgcattatgtctggtgcaggttcggcggatggcgggtattctgacaattacactcatgttcaggtgggcttcgataaaaaacatgagctggacggtgtggatctgttcactggcgtaaccatgacttatactgattcaagcgcagacagccacgcattttcaggtaaaacgaaatcagttggcggcggtctgtatgcgagcgcactgttcgagagcggcgcctacattgatctaattggcaagtatattcaccatgataatgattacacagggaactttgcaggcctgggcaccaaacactataacacgcattcatggtacgctggcgcagaaaccggctatagataccacctgaccgaggaaacctttatcgaaccgcaagcggaactggtttacggtgcggtcagtggcaagacctttcgttggaaagatggtgatatggatctgtcaatgaaaaaccgcgacttcagccccttgatcggccgcaccggcattgagctgggcaaaaccttctctggcaaagattggtctgttaccgcgcgtgcgggcacttcgtggcaatttgatctgctaaacaacggtgagactgtactgcgtgatgcgagtggcgaaaaacgtattaaaggtgaaaaagatagtagaatgctattcaacgtgggcatgaatgcgcagatcaaagataacatgcgttttgggttggagtttgaaaaatccgcgttcggtaaatataatgttgacaatgctgtgaacgcgaatttccgctacatgttttaactctaacggacttgagtgaggttgtaaagggagttggctcctcggtaccaaattccagaaaagaggcctcccgaaaggggggccttttttcgtttt

SEQ ID NO: 789 - protein, 294 aa, Artificial Sequence
  Description of Artificial Sequence: Synthetic polypeptide
MQVQLVESGGGVVQPGRSLRLSCAASGFTFSSYTMHWVRQAPGKGLEWVTFISYDGNNKYYADSVKGRFTISRDNSKNTLYLQMNSLRAEDTAIYYCARTGWLGPFDYWGQGTLVTVSSGGGSGGGSGGGSGGGEIVLTQSPGTLSLSPGERATLSCRASQSVGSSYLAWYQQKPGQAPRLLIYGAFSRATGIPDRFSGSGSGTDFTLTISRLEPEDFAVYYCQQYGSSPWTFGQGTKVEIKLNPLINEISKIISAAGNFDVKEERAAASLLQLSGNASDFSYGRNSITLTASA

SEQ ID NO: 790 - DNA, 5309 bp, Artificial Sequence
  Description of Artificial Sequence: Synthetic polynucleotide
gaattcgttaagacccactttcacatttaagttgtttttctaatccgcatatgatcaattcaaggccgaataagaaggctggctctgcaccttggtgatcaaataattcgatagcttgtcgtaataatggcggcatactatcagtagtaggtgtttccctttcttctttagcgacttgatgctcttgatcttccaatacgcaacctaaagtaaaatgccccacagcgctgagtgcatataatgcattctctagtgaaaaaccttgttggcataaaaaggctaattgattttcgagagtttcatactgtttttctgtaggccgtgtacctaaatgtacttttgctccatcgcgatgacttagtaaagcacatctaaaacttttagcgttattacgtaaaaaatcttgccagctttccccttctaaagggcaaaagtgagtatggtgcctatctaacatctcaatggctaaggcgtcgagcaaagcccgcttattttttacatgccaatacaatgtaggctgctctacacctagcttctgggcgagtttacgggttgttaaaccttcgattccgacctcattaagcagctctaatgcgctgttaatcactttacttttatctaatctagacatcattaattcctaatttttgttgacactctatcatttatagagttaatttaccactccctatcagtgatagagaaaagtgaatacgatttaattcggaggttttttgatgcaggtacaattagttgagagcggcggcggtgtggttcaaccgggccgtagtctgcgattgtcttgtgctgcatctggttttactttcagttcttacacgatgcactgggttcgccaagctccgggcaaaggcctggagtgggttacctttatttcttacgatggcaataataagtattacgctgattctgtgaaaggtcgctttactattagccgagataactctaaaaatactctgtatctgcaaatgaattctctgcgtgcggaagatactgcgatctattattgtgcgcgtactggttggctgggcccgtttgattattggggccaaggcacgctggttactgttagttcgggcggcggttctggtggcggctctggtggtggctctggcggcggcgagattgtgctgactcaatctccgggcacgctgtcactgtctccgggtgaacgcgcgaccctgtcttgtcgcgcgagtcaaagtgttggttcttcttatctggcttggtatcagcaaaagcctggtcaagcgccgcgtctgttgatttatggcgcgttttcgcgcgcgactggcattccggaccgattttctggttctggttctggcactgatttcactctgaccatttcacgcctggaaccggaggattttgcggtgtactattgccaacaatatggctcatcgccgtggacgtttggccaaggtactaaagttgagattaaacttaatccattaattaatgaaatcagcaaaatcatttcagctgcaggtaattttgatgttaaagaggaaagagctgcagcttctttattgcagttgtccggtaatgccagtgatttttcatatggacggaactcaataactttgacagcatcagcataatttattaatttaaataatagcaatcttactgggctgtgccacataagattgctatttttttggagtcataatggattcttgtcataaaattgattatgggttatacgccctggagattttagcccaataccataacgtctctgttaacccggaagaaattaaacatagatttgacacagacgggactggtctgggattaacgtcatggttgcttgctgcgaaatctttagaactaaaggtaaaacaggtaaaaaaaacaattgaccgattaaactttatttctttgcccgcattagtctggagagaggatggacgtcattttattctgactaaagtcagtaaagaagcaaacagatatcttatttttgatctggagcaacgaaatccccgtgttctcgaacagtctgagtttgaggcgttatatcaggggcatattattcttattgcttcccgttcttctgttaccgggaaactggcaaaatttgactttacctggtttatccctgccattataaaatacagaaaaatatttattgaaacccttgttgtatctgtttttttacaattatttgcattaataaccccccttttttttcaggtggttatggacaaagtattagtacacagggggttttcaacccttaatgttattactgtcgcattatctgttgtggtggtgtttgagattatactcagcggtttaagaacttacatttttgcacatagtacaagtcggattgatgttgagttgggtgccaaactcttccggcatttactggcgctaccgatctcttattttgagagtcgtcgtgttggtgatactgttgccagggtaagagaattagaccagatccgtaattttctgacaggacaggcattaacatctgttctggacttattattttcattcatattttttgcggtaatgtggtattacagcccaaagcttactctggtgatcttattttcgctgccctgttatgctgcatggtctgtttttattagccccattttgcgacgtcgccttgatgataagttttcacggaatgcggataatcaatctttcctggtggaatcagtcacggcgattaacactataaaagctatggcagtctcacctcagatgacgaacatatgggacaaacaattggcaggatatgttgctgcaggctttaaagtgacagtattagccaccattggtcaacaaggaatacagttaatacaaaagactgttatgatcatcaacctgtggttgggagcacacctggttatttccggggatttaagtattggtcagttaattgcttttaatatgcttgctggtcagattgttgcaccggttattcgccttgcacaaatctggcaggatttccagcaggttggtatatcagttacccgccttggtgatgtgcttaactctccaactgaaagttatcatgggaaactggcattaccggaaattaatggtaatatcacttttcgtaatatccggtttcgctataagcctgactctccggttattttagataatatcaatctcagtattaagcagggggaggttattggtattgtcggacgttctggttcaggaaaaagcacattaactaaattaattcaacgtttttatattcctgaaaatggccaggtcttaattgatggacatgatcttgcgttggccgatcctaactggttacgtcgtcaggtgggggttgtgttgcaggacaatgtgctgcttaatcgcagtattattgataatatctcactggctaatcctggtatgtccgtcgaaaaagttatttatgcagcgaaattagcaggcgctcatgattttatttctgaattgcgtgaggggtataacaccattgtcggggaacagggggcaggattatccggaggtcaacgtcaacgcatcgcaattgcaagggcgctggtgaacaaccctaaaatacttatttttgatgaagcaaccagtgctctggattatgagtcggagcatatcatcatgcgcaatatgcacaaaatatgtaagggcagaacggttataatcattgctcatcgtctgtctacagtaaaaaatgcagaccgcattattgtcatggaaaaagggaaaattgttgaacagggtaaacataaggaactgctttctgaaccggaaagtttatacagttacttatatcagttacagtcagactaacagaaagaacagaagaatatgaaaacatggttaatggggttcagcgagttcctgttgcgctataaacttgtctggagtgaaacatggaaaatccggaagcaattagatactccggtacgtgaaaaggacgaaaatgaattcttacccgctcatctggaattaattgaaacgccggtatccagacggccgcgtctggttgcttattttattatggggtttctggttattgctgtcattttatctgttttaggtcaggtggaaattgttgccactgcaaatgggaaattaacactaagtgggcgcagcaaagaaattaaacctattgaaaactcaatagttaaagaaattatcgtaaaagaaggagagtcagtccggaaaggggatgtgttattaaagcttacagcactgggagctgaagctgatacgttaaaaacacagtcatcactgttacagaccaggctggaacaaactcggtatcaaattctgagcaggtcaattgaattaaataaactacctgaactgaagcttcctgatgagccttattttcagaatgtatctgaagaggaagtactgcgtttaacttctttgataaaagaacagttttccacatggcaaaatcagaagtatcaaaaagaactgaatctggataagaaaagagcagagcgattaacaatacttgcccgtataaaccgttatgaaaatttatcgagagttgaaaaaagccgtctggatgatttcaggagtttattgcataaacaggcaattgcaaaacatgctgtacttgagcaggagaataaatatgtcgaggcagcaaatgaattacgggtttataaatcgcaactggagcaaattgagagtgagatattgtctgcaaaagaagaatatcagcttgtcacgcagctttttaaaaatgaaattttagacaagctaagacaaacaacagacaacattgagttattaactctggagttagagaaaaatgaagagcgtcaacaggcttcagtaatcagggcccctgtttcgggaaaagttcagcaactgaaggttcatactgaaggtggggttgttacaacagcggaaacactgatggtcatcgttccggaagatgacacgctggaggttactgctctggtacaaaataaagatattggttttattaacgtcgggcagaatgccatcattaaagtggaggcctttccttacacccgatatggttatctggtgggtaaggtgaaaaatataaatttagatgcaatagaagaccagaaactgggactcgtttttaatgtcattgtttctgttgaagagaatgatttgtcaaccgggaataagcacattccattaagctcgggtatggctgtcactgcagaaataaagactggaatgcgaagcgtaatcagctatcttcttagtcctctggaagagtctgtaacagaaagtttacatgagcgttaagtctcagagccgcggtatccggctcatatcttctcctg

SEQ ID NO: 791 - protein, 294 aa, Artificial Sequence
  Description of Artificial Sequence: Synthetic polypeptide
MEIVLTQSPGTLSLSPGERATLSCRASQSVGSSYLAWYQQKPGQAPRLLIYGAFSRATGIPDRFSGSGSGTDFTLTISRLEPEDFAVYYCQQYGSSPWTFGQGTKVEIKGGGSGGGSGGGSGGGQVQLVESGGGVVQPGRSLRLSCAASGFTFSSYTMHWVRQAPGKGLEWVTFISYDGNNKYYADSVKGRFTISRDNSKNTLYLQMNSLRAEDTAIYYCARTGWLGPFDYWGQGTLVTVSSLNPLINEISKIISAAGNFDVKEERAAASLLQLSGNASDFSYGRNSITLTASA

SEQ ID NO: 792 - DNA, 5309 bp, Artificial Sequence
  Description of Artificial Sequence: Synthetic polynucleotide
gaattcgttaagacccactttcacatttaagttgtttttctaatccgcatatgatcaattcaaggccgaataagaaggctggctctgcaccttggtgatcaaataattcgatagcttgtcgtaataatggcggcatactatcagtagtaggtgtttccctttcttctttagcgacttgatgctcttgatcttccaatacgcaacctaaagtaaaatgccccacagcgctgagtgcatataatgcattctctagtgaaaaaccttgttggcataaaaaggctaattgattttcgagagtttcatactgtttttctgtaggccgtgtacctaaatgtacttttgctccatcgcgatgacttagtaaagcacatctaaaacttttagcgttattacgtaaaaaatcttgccagctttccccttctaaagggcaaaagtgagtatggtgcctatctaacatctcaatggctaaggcgtcgagcaaagcccgcttattttttacatgccaatacaatgtaggctgctctacacctagcttctgggcgagtttacgggttgttaaaccttcgattccgacctcattaagcagctctaatgcgctgttaatcactttacttttatctaatctagacatcattaattcctaatttttgttgacactctatcatttatagagttaatttaccactccctatcagtgatagagaaaagtgaatcacaacgctgagagagagagaaatatggaaattgtactgacccagtcgcctggtaccctgtctctgtcgccgggtgaacgtgctaccctgtcttgtcgtgcttcgcaatcggttggctcgtcttatctggcatggtatcagcaaaaaccgggccaagcgcctcgtctgctgatttatggcgcgttttctcgtgctacgggcattcctgatcgtttttcgggctctggctctggtactgattttacgctgactatcagccgcttggaacctgaagattttgcggtttattattgccaacaatatggctcttctccgtggacgtttggtcaaggcactaaagttgaaattaaaggtggtggctcgggcggtggttctggtggtggtagtggtggtggtcaagtgcagttggttgaatcgggtggcggtgttgtgcagccgggccgttcgttgcgtctgtcttgcgcagcgagtggtttcaccttctcttcttatactatgcactgggtgcgtcaagcacctggcaaaggtctggagtgggtaacttttatttcatacgatggtaataataaatattatgcagattctgttaaaggtcgctttacgatttctcgcgataattcaaaaaatacgctgtatctgcagatgaattcgctgcgcgctgaggatactgcgatctactattgtgcgcgtactggttggctgggtccgtttgattactggggccaaggtacgctggttacagtttcgtcgcttaatccattaattaatgaaatcagcaaaatcatttcagctgcaggtaattttgatgttaaagaggaaagagctgcagcttctttattgcagttgtccggtaatgccagtgatttttcatatggacggaactcaataactttgacagcatcagcataatttattaatttaaataatagcaatcttactgggctgtgccacataagattgctatttttttggagtcataatggattcttgtcataaaattgattatgggttatacgccctggagattttagcccaataccataacgtctctgttaacccggaagaaattaaacatagatttgacacagacgggactggtctgggattaacgtcatggttgcttgctgcgaaatctttagaactaaaggtaaaacaggtaaaaaaaacaattgaccgattaaactttatttctttgcccgcattagtctggagagaggatggacgtcattttattctgactaaagtcagtaaagaagcaaacagatatcttatttttgatctggagcaacgaaatccccgtgttctcgaacagtctgagtttgaggcgttatatcaggggcatattattcttattgcttcccgttcttctgttaccgggaaactggcaaaatttgactttacctggtttatccctgccattataaaatacagaaaaatatttattgaaacccttgttgtatctgtttttttacaattatttgcattaataaccccccttttttttcaggtggttatggacaaagtattagtacacagggggttttcaacccttaatgttattactgtcgcattatctgttgtggtggtgtttgagattatactcagcggtttaagaacttacatttttgcacatagtacaagtcggattgatgttgagttgggtgccaaactcttccggcatttactggcgctaccgatctcttattttgagagtcgtcgtgttggtgatactgttgccagggtaagagaattagaccagatccgtaattttctgacaggacaggcattaacatctgttctggacttattattttcattcatattttttgcggtaatgtggtattacagcccaaagcttactctggtgatcttattttcgctgccctgttatgctgcatggtctgtttttattagccccattttgcgacgtcgccttgatgataagttttcacggaatgcggataatcaatctttcctggtggaatcagtcacggcgattaacactataaaagctatggcagtctcacctcagatgacgaacatatgggacaaacaattggcaggatatgttgctgcaggctttaaagtgacagtattagccaccattggtcaacaaggaatacagttaatacaaaagactgttatgatcatcaacctgtggttgggagcacacctggttatttccggggatttaagtattggtcagttaattgcttttaatatgcttgctggtcagattgttgcaccggttattcgccttgcacaaatctggcaggatttccagcaggttggtatatcagttacccgccttggtgatgtgcttaactctccaactgaaagttatcatgggaaactggcattaccggaaattaatggtaatatcacttttcgtaatatccggtttcgctataagcctgactctccggttattttagataatatcaatctcagtattaagcagggggaggttattggtattgtcggacgttctggttcaggaaaaagcacattaactaaattaattcaacgtttttatattcctgaaaatggccaggtcttaattgatggacatgatcttgcgttggccgatcctaactggttacgtcgtcaggtgggggttgtgttgcaggacaatgtgctgcttaatcgcagtattattgataatatctcactggctaatcctggtatgtccgtcgaaaaagttatttatgcagcgaaattagcaggcgctcatgattttatttctgaattgcgtgaggggtataacaccattgtcggggaacagggggcaggattatccggaggtcaacgtcaacgcatcgcaattgcaagggcgctggtgaacaaccctaaaatacttatttttgatgaagcaaccagtgctctggattatgagtcggagcatatcatcatgcgcaatatgcacaaaatatgtaagggcagaacggttataatcattgctcatcgtctgtctacagtaaaaaatgcagaccgcattattgtcatggaaaaagggaaaattgttgaacagggtaaacataaggaactgctttctgaaccggaaagtttatacagttacttatatcagttacagtcagactaacagaaagaacagaagaatatgaaaacatggttaatggggttcagcgagttcctgttgcgctataaacttgtctggagtgaaacatggaaaatccggaagcaattagatactccggtacgtgaaaaggacgaaaatgaattcttacccgctcatctggaattaattgaaacgccggtatccagacggccgcgtctggttgcttattttattatggggtttctggttattgctgtcattttatctgttttaggtcaggtggaaattgttgccactgcaaatgggaaattaacactaagtgggcgcagcaaagaaattaaacctattgaaaactcaatagttaaagaaattatcgtaaaagaaggagagtcagtccggaaaggggatgtgttattaaagcttacagcactgggagctgaagctgatacgttaaaaacacagtcatcactgttacagaccaggctggaacaaactcggtatcaaattctgagcaggtcaattgaattaaataaactacctgaactgaagcttcctgatgagccttattttcagaatgtatctgaagaggaagtactgcgtttaacttctttgataaaagaacagttttccacatggcaaaatcagaagtatcaaaaagaactgaatctggataagaaaagagcagagcgattaacaatacttgcccgtataaaccgttatgaaaatttatcgagagttgaaaaaagccgtctggatgatttcaggagtttattgcataaacaggcaattgcaaaacatgctgtacttgagcaggagaataaatatgtcgaggcagcaaatgaattacgggtttataaatcgcaactggagcaaattgagagtgagatattgtctgcaaaagaagaatatcagcttgtcacgcagctttttaaaaatgaaattttagacaagctaagacaaacaacagacaacattgagttattaactctggagttagagaaaaatgaagagcgtcaacaggcttcagtaatcagggcccctgtttcgggaaaagttcagcaactgaaggttcatactgaaggtggggttgttacaacagcggaaacactgatggtcatcgttccggaagatgacacgctggaggttactgctctggtacaaaataaagatattggttttattaacgtcgggcagaatgccatcattaaagtggaggcctttccttacacccgatatggttatctggtgggtaaggtgaaaaatataaatttagatgcaatagaagaccagaaactgggactcgtttttaatgtcattgtttctgttgaagagaatgatttgtcaaccgggaataagcacattccattaagctcgggtatggctgtcactgcagaaataaagactggaatgcgaagcgtaatcagctatcttcttagtcctctggaagagtctgtaacagaaagtttacatgagcgttaagtctcagagccgcggtatccggctcatatcttctcctg

SEQ ID NO: 793 - protein, 288 aa, Artificial Sequence
  Description of Artificial Sequence: Synthetic polypeptide
MQVQLVESGGGVVQPGRSLRLDCKASGITFSNSGMHWVRQAPGKGLEWVAVIWYDGSKRYYADSVKGRFTISRDNSKNTLFLQMNSLRAEDTAVYYCATNDDYWGQGTLVTVSSGGGSGGGSGGGSGGGEIVLTQSPATLSLSPGERATLSCRASQSVSSYLAWYQQKPGQAPRLLIYDASNRATGIPARFSGSGSGTDFTLTISSLEPEDFAVYYCQQSSNWPRTFGQGTKVEIKLNPLINEISKIISAAGNFDVKEERAAASLLQLSGNASDFSYGRNSITLTASA

SEQ ID NO: 794 - DNA, 5291 bp, Artificial Sequence
  Description of Artificial Sequence: Synthetic polynucleotide
gaattcgttaagacccactttcacatttaagttgtttttctaatccgcatatgatcaattcaaggccgaataagaaggctggctctgcaccttggtgatcaaataattcgatagcttgtcgtaataatggcggcatactatcagtagtaggtgtttccctttcttctttagcgacttgatgctcttgatcttccaatacgcaacctaaagtaaaatgccccacagcgctgagtgcatataatgcattctctagtgaaaaaccttgttggcataaaaaggctaattgattttcgagagtttcatactgtttttctgtaggccgtgtacctaaatgtacttttgctccatcgcgatgacttagtaaagcacatctaaaacttttagcgttattacgtaaaaaatcttgccagctttccccttctaaagggcaaaagtgagtatggtgcctatctaacatctcaatggctaaggcgtcgagcaaagcccgcttattttttacatgccaatacaatgtaggctgctctacacctagcttctgggcgagtttacgggttgttaaaccttcgattccgacctcattaagcagctctaatgcgctgttaatcactttacttttatctaatctagacatcattaattcctaatttttgttgacactctatcatttatagagttaatttaccactccctatcagtgatagagaaaagtgaagttaaattgaggaggaggcagttccatgcaagtacaactggttgaatccggcggaggagtggtgcaaccgggccgcagtttgcgtctggattgtaaagcttcaggcatcactttttctaattctggtatgcactgggttcgccaagctccgggtaaaggtctggagtgggttgcggtgatctggtatgatggttctaaacgatattatgcggatagtgttaagggtcgttttactatttctcgtgataattctaagaacaccttgtttctgcagatgaatagtctgcgcgctgaggatactgcggtatattattgtgcgactaatgacgattattggggccaaggcacgctggttaccgtgagctctggtggtggttcgggtggtggttctggtggtgggagcggcggtggcgagatcgttctgactcaaagcccggcgactctgagtctgagtccgggtgaacgtgcgactctgagctgccgtgcgtctcagagtgtgtcgagttatctggcgtggtaccaacaaaaaccgggccaggcgccgcgactgctgatttatgatgcttctaatcgtgcgactggtattccggcgcgctttagcggttctggctcaggcactgacttcactctgactatttcttcgctggaaccggaagattttgcggtgtactattgtcaacaatcatctaattggcctcgtacgttcggtcaaggtacaaaagtggagataaaacttaatccattaattaatgaaatcagcaaaatcatttcagctgcaggtaattttgatgttaaagaggaaagagctgcagcttctttattgcagttgtccggtaatgccagtgatttttcatatggacggaactcaataactttgacagcatcagcataatttattaatttaaataatagcaatcttactgggctgtgccacataagattgctatttttttggagtcataatggattcttgtcataaaattgattatgggttatacgccctggagattttagcccaataccataacgtctctgttaacccggaagaaattaaacatagatttgacacagacgggactggtctgggattaacgtcatggttgcttgctgcgaaatctttagaactaaaggtaaaacaggtaaaaaaaacaattgaccgattaaactttatttctttgcccgcattagtctggagagaggatggacgtcattttattctgactaaagtcagtaaagaagcaaacagatatcttatttttgatctggagcaacgaaatccccgtgttctcgaacagtctgagtttgaggcgttatatcaggggcatattattcttattgcttcccgttcttctgttaccgggaaactggcaaaatttgactttacctggtttatccctgccattataaaatacagaaaaatatttattgaaacccttgttgtatctgtttttttacaattatttgcattaataaccccccttttttttcaggtggttatggacaaagtattagtacacagggggttttcaacccttaatgttattactgtcgcattatctgttgtggtggtgtttgagattatactcagcggtttaagaacttacatttttgcacatagtacaagtcggattgatgttgagttgggtgccaaactcttccggcatttactggcgctaccgatctcttattttgagagtcgtcgtgttggtgatactgttgccagggtaagagaattagaccagatccgtaattttctgacaggacaggcattaacatctgttctggacttattattttcattcatattttttgcggtaatgtggtattacagcccaaagcttactctggtgatcttattttcgctgccctgttatgctgcatggtctgtttttattagccccattttgcgacgtcgccttgatgataagttttcacggaatgcggataatcaatctttcctggtggaatcagtcacggcgattaacactataaaagctatggcagtctcacctcagatgacgaacatatgggacaaacaattggcaggatatgttgctgcaggctttaaagtgacagtattagccaccattggtcaacaaggaatacagttaatacaaaagactgttatgatcatcaacctgtggttgggagcacacctggttatttccggggatttaagtattggtcagttaattgcttttaatatgcttgctggtcagattgttgcaccggttattcgccttgcacaaatctggcaggatttccagcaggttggtatatcagttacccgccttggtgatgtgcttaactctccaactgaaagttatcatgggaaactggcattaccggaaattaatggtaatatcacttttcgtaatatccggtttcgctataagcctgactctccggttattttagataatatcaatctcagtattaagcagggggaggttattggtattgtcggacgttctggttcaggaaaaagcacattaactaaattaattcaacgtttttatattcctgaaaatggccaggtcttaattgatggacatgatcttgcgttggccgatcctaactggttacgtcgtcaggtgggggttgtgttgcaggacaatgtgctgcttaatcgcagtattattgataatatctcactggctaatcctggtatgtccgtcgaaaaagttatttatgcagcgaaattagcaggcgctcatgattttatttctgaattgcgtgaggggtataacaccattgtcggggaacagggggcaggattatccggaggtcaacgtcaacgcatcgcaattgcaagggcgctggtgaacaaccctaaaatacttatttttgatgaagcaaccagtgctctggattatgagtcggagcatatcatcatgcgcaatatgcacaaaatatgtaagggcagaacggttataatcattgctcatcgtctgtctacagtaaaaaatgcagaccgcattattgtcatggaaaaagggaaaattgttgaacagggtaaacataaggaactgctttctgaaccggaaagtttatacagttacttatatcagttacagtcagactaacagaaagaacagaagaatatgaaaacatggttaatggggttcagcgagttcctgttgcgctataaacttgtctggagtgaaacatggaaaatccggaagcaattagatactccggtacgtgaaaaggacgaaaatgaattcttacccgctcatctggaattaattgaaacgccggtatccagacggccgcgtctggttgcttattttattatggggtttctggttattgctgtcattttatctgttttaggtcaggtggaaattgttgccactgcaaatgggaaattaacactaagtgggcgcagcaaagaaattaaacctattgaaaactcaatagttaaagaaattatcgtaaaagaaggagagtcagtccggaaaggggatgtgttattaaagcttacagcactgggagctgaagctgatacgttaaaaacacagtcatcactgttacagaccaggctggaacaaactcggtatcaaattctgagcaggtcaattgaattaaataaactacctgaactgaagcttcctgatgagccttattttcagaatgtatctgaagaggaagtactgcgtttaacttctttgataaaagaacagttttccacatggcaaaatcagaagtatcaaaaagaactgaatctggataagaaaagagcagagcgattaacaatacttgcccgtataaaccgttatgaaaatttatcgagagttgaaaaaagccgtctggatgatttcaggagtttattgcataaacaggcaattgcaaaacatgctgtacttgagcaggagaataaatatgtcgaggcagcaaatgaattacgggtttataaatcgcaactggagcaaattgagagtgagatattgtctgcaaaagaagaatatcagcttgtcacgcagctttttaaaaatgaaattttagacaagctaagacaaacaacagacaacattgagttattaactctggagttagagaaaaatgaagagcgtcaacaggcttcagtaatcagggcccctgtttcgggaaaagttcagcaactgaaggttcatactgaaggtggggttgttacaacagcggaaacactgatggtcatcgttccggaagatgacacgctggaggttactgctctggtacaaaataaagatattggttttattaacgtcgggcagaatgccatcattaaagtggaggcctttccttacacccgatatggttatctggtgggtaaggtgaaaaatataaatttagatgcaatagaagaccagaaactgggactcgtttttaatgtcattgtttctgttgaagagaatgatttgtcaaccgggaataagcacattccattaagctcgggtatggctgtcactgcagaaataaagactggaatgcgaagcgtaatcagctatcttcttagtcctctggaagagtctgtaacagaaagtttacatgagcgttaagtctcagagccgcggtatccggctcatatcttctcctg

SEQ ID NO: 795 - protein, 288 aa, Artificial Sequence
  Description of Artificial Sequence: Synthetic polypeptide
MEIVLTQSPATLSLSPGERATLSCRASQSVSSYLAWYQQKPGQAPRLLIYDASNRATGIPARFSGSGSGTDFTLTISSLEPEDFAVYYCQQSSNWPRTFGQGTKVEIKGGGSGGGSGGGSGGGQVQLVESGGGVVQPGRSLRLDCKASGITFSNSGMHWVRQAPGKGLEWVAVIWYDGSKRYYADSVKGRFTISRDNSKNTLFLQMNSLRAEDTAVYYCATNDDYWGQGTLVTVSSLNPLINEISKIISAAGNFDVKEERAAASLLQLSGNASDFSYGRNSITLTASA

SEQ ID NO: 796 - DNA, 5291 bp, Artificial Sequence
  Description of Artificial Sequence: Synthetic polynucleotide
gaattcgttaagacccactttcacatttaagttgtttttctaatccgcatatgatcaattcaaggccgaataagaaggctggctctgcaccttggtgatcaaataattcgatagcttgtcgtaataatggcggcatactatcagtagtaggtgtttccctttcttctttagcgacttgatgctcttgatcttccaatacgcaacctaaagtaaaatgccccacagcgctgagtgcatataatgcattctctagtgaaaaaccttgttggcataaaaaggctaattgattttcgagagtttcatactgtttttctgtaggccgtgtacctaaatgtacttttgctccatcgcgatgacttagtaaagcacatctaaaacttttagcgttattacgtaaaaaatcttgccagctttccccttctaaagggcaaaagtgagtatggtgcctatctaacatctcaatggctaaggcgtcgagcaaagcccgcttattttttacatgccaatacaatgtaggctgctctacacctagcttctgggcgagtttacgggttgttaaaccttcgattccgacctcattaagcagctctaatgcgctgttaatcactttacttttatctaatctagacatcattaattcctaatttttgttgacactctatcatttatagagttaatttaccactccctatcagtgatagagaaaagtgaatataccgaacgcttaaggaggctttatggaaatcgtgctgactcagagtccggcgactctgtctctgagtccgggcgaacgcgcgactctgtcttgccgtgcgtctcaatctgtgtcttcatacttggcttggtaccaacaaaaaccgggccaggcgccgcgactgttgatttatgatgcgtcgaatcgcgcgactggcattccggcgcgcttttcgggtagcggttctggtactgattttacgctgactatctcttctctggagcctgaagatttcgctgtttattactgccaacagtctagtaattggccgcgtactttcggccagggcactaaggtggaaattaaaggtggcggctcgggcggcggctcgggtggtggttctggtggtggccaagtgcaactggtggaaagtggcggcggggtggtgcaaccgggccgttctctgcgcctggattgtaaagcttcaggcattacttttagcaactctggtatgcactgggttcgccaagctccgggcaaaggcctggaatgggtggcggttatttggtacgatggctctaaacgttattacgctgacagtgttaaaggccgctttaccatttctcgtgataattctaaaaataccctgtttctgcaaatgaactcgctgcgcgcggaagatactgctgtttactattgtgcgactaatgatgattactggggtcaaggtaccctggttaccgtgtcttctcttaatccattaattaatgaaatcagcaaaatcatttcagctgcaggtaattttgatgttaaagaggaaagagctgcagcttctttattgcagttgtccggtaatgccagtgatttttcatatggacggaactcaataactttgacagcatcagcataatttattaatttaaataatagcaatcttactgggctgtgccacataagattgctatttttttggagtcataatggattcttgtcataaaattgattatgggttatacgccctggagattttagcccaataccataacgtctctgttaacccggaagaaattaaacatagatttgacacagacgggactggtctgggattaacgtcatggttgcttgctgcgaaatctttagaactaaaggtaaaacaggtaaaaaaaacaattgaccgattaaactttatttctttgcccgcattagtctggagagaggatggacgtcattttattctgactaaagtcagtaaagaagcaaacagatatcttatttttgatctggagcaacgaaatccccgtgttctcgaacagtctgagtttgaggcgttatatcaggggcatattattcttattgcttcccgttcttctgttaccgggaaactggcaaaatttgactttacctggtttatccctgccattataaaatacagaaaaatatttattgaaacccttgttgtatctgtttttttacaattatttgcattaataaccccccttttttttcaggtggttatggacaaagtattagtacacagggggttttcaacccttaatgttattactgtcgcattatctgttgtggtggtgtttgagattatactcagcggtttaagaacttacatttttgcacatagtacaagtcggattgatgttgagttgggtgccaaactcttccggcatttactggcgctaccgatctcttattttgagagtcgtcgtgttggtgatactgttgccagggtaagagaattagaccagatccgtaattttctgacaggacaggcattaacatctgttctggacttattattttcattcatattttttgcggtaatgtggtattacagcccaaagcttactctggtgatcttattttcgctgccctgttatgctgcatggtctgtttttattagccccattttgcgacgtcgccttgatgataagttttcacggaatgcggataatcaatctttcctggtggaatcagtcacggcgattaacactataaaagctatggcagtctcacctcagatgacgaacatatgggacaaacaattggcaggatatgttgctgcaggctttaaagtgacagtattagccaccattggtcaacaaggaatacagttaatacaaaagactgttatgatcatcaacctgtggttgggagcacacctggttatttccggggatttaagtattggtcagttaattgcttttaatatgcttgctggtcagattgttgcaccggttattcgccttgcacaaatctggcaggatttccagcaggttggtatatcagttacccgccttggtgatgtgcttaactctccaactgaaagttatcatgggaaactggcattaccggaaattaatggtaatatcacttttcgtaatatccggtttcgctataagcctgactctccggttattttagataatatcaatctcagtattaagcagggggaggttattggtattgtcggacgttctggttcaggaaaaagcacattaactaaattaattcaacgtttttatattcctgaaaatggccaggtcttaattgatggacatgatcttgcgttggccgatcctaactggttacgtcgtcaggtgggggttgtgttgcaggacaatgtgctgcttaatcgcagtattattgataatatctcactggctaatcctggtatgtccgtcgaaaaagttatttatgcagcgaaattagcaggcgctcatgattttatttctgaattgcgtgaggggtataacaccattgtcggggaacagggggcaggattatccggaggtcaacgtcaacgcatcgcaattgcaagggcgctggtgaacaaccctaaaatacttatttttgatgaagcaaccagtgctctggattatgagtcggagcatatcatcatgcgcaatatgcacaaaatatgtaagggcagaacggttataatcattgctcatcgtctgtctacagtaaaaaatgcagaccgcattattgtcatggaaaaagggaaaattgttgaacagggtaaacataaggaactgctttctgaaccggaaagtttatacagttacttatatcagttacagtcagactaacagaaagaacagaagaatatgaaaacatggttaatggggttcagcgagttcctgttgcgctataaacttgtctggagtgaaacatggaaaatccggaagcaattagatactccggtacgtgaaaaggacgaaaatgaattcttacccgctcatctggaattaattgaaacgccggtatccagacggccgcgtctggttgcttattttattatggggtttctggttattgctgtcattttatctgttttaggtcaggtggaaattgttgccactgcaaatgggaaattaacactaagtgggcgcagcaaagaaattaaacctattgaaaactcaatagttaaagaaattatcgtaaaagaaggagagtcagtccggaaaggggatgtgttattaaagcttacagcactgggagctgaagctgatacgttaaaaacacagtcatcactgttacagaccaggctggaacaaactcggtatcaaattctgagcaggtcaattgaattaaataaactacctgaactgaagcttcctgatgagccttattttcagaatgtatctgaagaggaagtactgcgtttaacttctttgataaaagaacagttttccacatggcaaaatcagaagtatcaaaaagaactgaatctggataagaaaagagcagagcgattaacaatacttgcccgtataaaccgttatgaaaatttatcgagagttgaaaaaagccgtctggatgatttcaggagtttattgcataaacaggcaattgcaaaacatgctgtacttgagcaggagaataaatatgtcgaggcagcaaatgaattacgggtttataaatcgcaactggagcaaattgagagtgagatattgtctgcaaaagaagaatatcagcttgtcacgcagctttttaaaaatgaaattttagacaagctaagacaaacaacagacaacattgagttattaactctggagttagagaaaaatgaagagcgtcaacaggcttcagtaatcagggcccctgtttcgggaaaagttcagcaactgaaggttcatactgaaggtggggttgttacaacagcggaaacactgatggtcatcgttccggaagatgacacgctggaggttactgctctggtacaaaataaagatattggttttattaacgtcgggcagaatgccatcattaaagtggaggcctttccttacacccgatatggttatctggtgggtaaggtgaaaaatataaatttagatgcaatagaagaccagaaactgggactcgtttttaatgtcattgtttctgttgaagagaatgatttgtcaaccgggaataagcacattccattaagctcgggtatggctgtcactgcagaaataaagactggaatgcgaagcgtaatcagctatcttcttagtcctctggaagagtctgtaacagaaagtttacatgagcgttaagtctcagagccgcggtatccggctcatatcttctcctg

SEQ ID NO: 797 - protein, 294 aa, Artificial Sequence
  Description of Artificial Sequence: Synthetic polypeptide
MEVQLVESGGGLVQPGGSLRLSCAASGFTFSDSWIHWVRQAPGKGLEWVAWISPYGGSTYYADSVKGRFTISADTSKNTAYLQMNSLRAEDTAVYYCARRHWPGGFDYWGQGTLVTVSSGGGSGGGSGGGSGGGDIQMTQSPSSLSASVGDRVTITCRASQDVSTAVAWYQQKPGKAPKLLIYSASFLYSGVPSRFSGSGSGTDFTLTISSLQPEDFATYYCQQYLYHPATFGQGTKVEIKRLNPLINEISKIISAAGNFDVKEERAAASLLQLSGNASDFSYGRNSITLTASA

SEQ ID NO: 798 - DNA, 5309 bp, Artificial Sequence
  Description of Artificial Sequence: Synthetic polynucleotide
gaattcgttaagacccactttcacatttaagttgtttttctaatccgcatatgatcaattcaaggccgaataagaaggctggctctgcaccttggtgatcaaataattcgatagcttgtcgtaataatggcggcatactatcagtagtaggtgtttccctttcttctttagcgacttgatgctcttgatcttccaatacgcaacctaaagtaaaatgccccacagcgctgagtgcatataatgcattctctagtgaaaaaccttgttggcataaaaaggctaattgattttcgagagtttcatactgtttttctgtaggccgtgtacctaaatgtacttttgctccatcgcgatgacttagtaaagcacatctaaaacttttagcgttattacgtaaaaaatcttgccagctttccccttctaaagggcaaaagtgagtatggtgcctatctaacatctcaatggctaaggcgtcgagcaaagcccgcttattttttacatgccaatacaatgtaggctgctctacacctagcttctgggcgagtttacgggttgttaaaccttcgattccgacctcattaagcagctctaatgcgctgttaatcactttacttttatctaatctagacatcattaattcctaatttttgttgacactctatcatttatagagttaatttaccactccctatcagtgatagagaaaagtgaagatagggaccaggtaaggaggatgaatggaagtgcagctggtggagtcaggtggaggcttggtgcaaccgggcggttcactgcgtctgtcatgtgcggcgtctgggtttacttttagtgactcttggattcactgggtgcgccaggctccgggtaaaggcctggaatgggtagcttggattagtccttacggtggctcgacctattatgctgattcggtaaagggtcgctttactattagcgctgatacttctaaaaatactgcatacctgcagatgaatagcctgcgcgctgaggatactgctgtgtattattgcgcgcgtcgccactggccgggcggctttgattattggggccaaggtactctggttaccgtgtctagtggcggtggtagcggcggcggctcaggtggcggctcgggcggtggcgacattcagatgactcagtctccgtcttctttgtcggcgagcgtgggcgatcgtgttaccatcacgtgtcgcgcgagccaagatgtgtcgactgcggtggcttggtatcaacaaaaaccgggtaaagctccgaaactgctgatttatagtgcgtcttttttgtattctggtgttccgtctcgtttctctggctcaggtagcggtactgattttacgctgactatttcttcactgcaaccggaagattttgctacgtattattgtcaacaatatctgtatcacccggcgacgtttggtcagggtactaaggtggagataaaacgccttaatccattaattaatgaaatcagcaaaatcatttcagctgcaggtaattttgatgttaaagaggaaagagctgcagcttctttattgcagttgtccggtaatgccagtgatttttcatatggacggaactcaataactttgacagcatcagcataatttattaatttaaataatagcaatcttactgggctgtgccacataagattgctatttttttggagtcataatggattcttgtcataaaattgattatgggttatacgccctggagattttagcccaataccataacgtctctgttaacccggaagaaattaaacatagatttgacacagacgggactggtctgggattaacgtcatggttgcttgctgcgaaatctttagaactaaaggtaaaacaggtaaaaaaaacaattgaccgattaaactttatttctttgcccgcattagtctggagagaggatggacgtcattttattctgactaaagtcagtaaagaagcaaacagatatcttatttttgatctggagcaacgaaatccccgtgttctcgaacagtctgagtttgaggcgttatatcaggggcatattattcttattgcttcccgttcttctgttaccgggaaactggcaaaatttgactttacctggtttatccctgccattataaaatacagaaaaatatttattgaaacccttgttgtatctgtttttttacaattatttgcattaataaccccccttttttttcaggtggttatggacaaagtattagtacacagggggttttcaacccttaatgttattactgtcgcattatctgttgtggtggtgtttgagattatactcagcggtttaagaacttacatttttgcacatagtacaagtcggattgatgttgagttgggtgccaaactcttccggcatttactggcgctaccgatctcttattttgagagtcgtcgtgttggtgatactgttgccagggtaagagaattagaccagatccgtaattttctgacaggacaggcattaacatctgttctggacttattattttcattcatattttttgcggtaatgtggtattacagcccaaagcttactctggtgatcttattttcgctgccctgttatgctgcatggtctgtttttattagccccattttgcgacgtcgccttgatgataagttttcacggaatgcggataatcaatctttcctggtggaatcagtcacggcgattaacactataaaagctatggcagtctcacctcagatgacgaacatatgggacaaacaattggcaggatatgttgctgcaggctttaaagtgacagtattagccaccattggtcaacaaggaatacagttaatacaaaagactgttatgatcatcaacctgtggttgggagcacacctggttatttccggggatttaagtattggtcagttaattgcttttaatatgcttgctggtcagattgttgcaccggttattcgccttgcacaaatctggcaggatttccagcaggttggtatatcagttacccgccttggtgatgtgcttaactctccaactgaaagttatcatgggaaactggcattaccggaaattaatggtaatatcacttttcgtaatatccggtttcgctataagcctgactctccggttattttagataatatcaatctcagtattaagcagggggaggttattggtattgtcggacgttctggttcaggaaaaagcacattaactaaattaattcaacgtttttatattcctgaaaatggccaggtcttaattgatggacatgatcttgcgttggccgatcctaactggttacgtcgtcaggtgggggttgtgttgcaggacaatgtgctgcttaatcgcagtattattgataatatctcactggctaatcctggtatgtccgtcgaaaaagttatttatgcagcgaaattagcaggcgctcatgattttatttctgaattgcgtgaggggtataacaccattgtcggggaacagggggcaggattatccggaggtcaacgtcaacgcatcgcaattgcaagggcgctggtgaacaaccctaaaatacttatttttgatgaagcaaccagtgctctggattatgagtcggagcatatcatcatgcgcaatatgcacaaaatatgtaagggcagaacggttataatcattgctcatcgtctgtctacagtaaaaaatgcagaccgcattattgtcatggaaaaagggaaaattgttgaacagggtaaacataaggaactgctttctgaaccggaaagtttatacagttacttatatcagttacagtcagactaacagaaagaacagaagaatatgaaaacatggttaatggggttcagcgagttcctgttgcgctataaacttgtctggagtgaaacatggaaaatccggaagcaattagatactccggtacgtgaaaaggacgaaaatgaattcttacccgctcatctggaattaattgaaacgccggtatccagacggccgcgtctggttgcttattttattatggggtttctggttattgctgtcattttatctgttttaggtcaggtggaaattgttgccactgcaaatgggaaattaacactaagtgggcgcagcaaagaaattaaacctattgaaaactcaatagttaaagaaattatcgtaaaagaaggagagtcagtccggaaaggggatgtgttattaaagcttacagcactgggagctgaagctgatacgttaaaaacacagtcatcactgttacagaccaggctggaacaaactcggtatcaaattctgagcaggtcaattgaattaaataaactacctgaactgaagcttcctgatgagccttattttcagaatgtatctgaagaggaagtactgcgtttaacttctttgataaaagaacagttttccacatggcaaaatcagaagtatcaaaaagaactgaatctggataagaaaagagcagagcgattaacaatacttgcccgtataaaccgttatgaaaatttatcgagagttgaaaaaagccgtctggatgatttcaggagtttattgcataaacaggcaattgcaaaacatgctgtacttgagcaggagaataaatatgtcgaggcagcaaatgaattacgggtttataaatcgcaactggagcaaattgagagtgagatattgtctgcaaaagaagaatatcagcttgtcacgcagctttttaaaaatgaaattttagacaagctaagacaaacaacagacaacattgagttattaactctggagttagagaaaaatgaagagcgtcaacaggcttcagtaatcagggcccctgtttcgggaaaagttcagcaactgaaggttcatactgaaggtggggttgttacaacagcggaaacactgatggtcatcgttccggaagatgacacgctggaggttactgctctggtacaaaataaagatattggttttattaacgtcgggcagaatgccatcattaaagtggaggcctttccttacacccgatatggttatctggtgggtaaggtgaaaaatataaatttagatgcaatagaagaccagaaactgggactcgtttttaatgtcattgtttctgttgaagagaatgatttgtcaaccgggaataagcacattccattaagctcgggtatggctgtcactgcagaaataaagactggaatgcgaagcgtaatcagctatcttcttagtcctctggaagagtctgtaacagaaagtttacatgagcgttaagtctcagagccgcggtatccggctcatatcttctcctg

SEQ ID NO: 799 - protein, 294 aa, Artificial Sequence
  Description of Artificial Sequence: Synthetic polypeptide
MDIQMTQSPSSLSASVGDRVTITCRASQDVSTAVAWYQQKPGKAPKLLIYSASFLYSGVPSRFSGSGSGTDFTLTISSLQPEDFATYYCQQYLYHPATFGQGTKVEIKRGGGSGGGSGGGSGGGEVQLVESGGGLVQPGGSLRLSCAASGFTFSDSWIHWVRQAPGKGLEWVAWISPYGGSTYYADSVKGRFTISADTSKNTAYLQMNSLRAEDTAVYYCARRHWPGGFDYWGQGTLVTVSSLNPLINEISKIISAAGNFDVKEERAAASLLQLSGNASDFSYGRNSITLTASA

SEQ ID NO: 800 - DNA, 5309 bp, Artificial Sequence
  Description of Artificial Sequence: Synthetic polynucleotide
gaattcgttaagacccactttcacatttaagttgtttttctaatccgcatatgatcaattcaaggccgaataagaaggctggctctgcaccttggtgatcaaataattcgatagcttgtcgtaataatggcggcatactatcagtagtaggtgtttccctttcttctttagcgacttgatgctcttgatcttccaatacgcaacctaaagtaaaatgccccacagcgctgagtgcatataatgcattctctagtgaaaaaccttgttggcataaaaaggctaattgattttcgagagtttcatactgtttttctgtaggccgtgtacctaaatgtacttttgctccatcgcgatgacttagtaaagcacatctaaaacttttagcgttattacgtaaaaaatcttgccagctttccccttctaaagggcaaaagtgagtatggtgcctatctaacatctcaatggctaaggcgtcgagcaaagcccgcttattttttacatgccaatacaatgtaggctgctctacacctagcttctgggcgagtttacgggttgttaaaccttcgattccgacctcattaagcagctctaatgcgctgttaatcactttacttttatctaatctagacatcattaattcctaatttttgttgacactctatcatttatagagttaatttaccactccctatcagtgatagagaaaagtgaaataaatcccttcatgaggaggtaagatggatattcaaatgactcaatctccgagctctctgagtgcgtctgtgggtgatcgtgtgactattacttgtcgtgcgtctcaagatgtttcaactgcggttgcgtggtatcaacagaaaccgggcaaggcgcctaagctgctgatttattctgcttcgttcctgtacagcggtgtgccgtctcgtttctctggctctggttcgggtactgatttcactctgactatttcgagtctgcagccggaagattttgcgacttattattgtcaacaatatctgtatcaccctgcgacgtttggtcaaggcacgaaagttgaaattaaacgtggtggtggctctggtggtggcagcggtggtgggtcgggtggcggtgaagttcaactggttgagtcaggtggtggcctggtgcaaccgggcggctctctgcgcctgtcttgtgctgcgtcgggttttacgttctctgatagctggattcactgggtacgccaggcaccgggcaaaggtctggaatgggtagcttggatttcaccttatggtggctctacttattacgcggatagcgtgaaaggtcgctttactatttctgcggacactagcaaaaatactgcttacctgcaaatgaattcgctgcgtgctgaggatactgcagtgtattactgtgcgcgtcgtcattggcctggcggctttgattattggggtcaaggtactctggttactgttagcagccttaatccattaattaatgaaatcagcaaaatcatttcagctgcaggtaattttgatgttaaagaggaaagagctgcagcttctttattgcagttgtccggtaatgccagtgatttttcatatggacggaactcaataactttgacagcatcagcataatttattaatttaaataatagcaatcttactgggctgtgccacataagattgctatttttttggagtcataatggattcttgtcataaaattgattatgggttatacgccctggagattttagcccaataccataacgtctctgttaacccggaagaaattaaacatagatttgacacagacgggactggtctgggattaacgtcatggttgcttgctgcgaaatctttagaactaaaggtaaaacaggtaaaaaaaacaattgaccgattaaactttatttctttgcccgcattagtctggagagaggatggacgtcattttattctgactaaagtcagtaaagaagcaaacagatatcttatttttgatctggagcaacgaaatccccgtgttctcgaacagtctgagtttgaggcgttatatcaggggcatattattcttattgcttcccgttcttctgttaccgggaaactggcaaaatttgactttacctggtttatccctgccattataaaatacagaaaaatatttattgaaacccttgttgtatctgtttttttacaattatttgcattaataaccccccttttttttcaggtggttatggacaaagtattagtacacagggggttttcaacccttaatgttattactgtcgcattatctgttgtggtggtgtttgagattatactcagcggtttaagaacttacatttttgcacatagtacaagtcggattgatgttgagttgggtgccaaactcttccggcatttactggcgctaccgatctcttattttgagagtcgtcgtgttggtgatactgttgccagggtaagagaattagaccagatccgtaattttctgacaggacaggcattaacatctgttctggacttattattttcattcatattttttgcggtaatgtggtattacagcccaaagcttactctggtgatcttattttcgctgccctgttatgctgcatggtctgtttttattagccccattttgcgacgtcgccttgatgataagttttcacggaatgcggataatcaatctttcctggtggaatcagtcacggcgattaacactataaaagctatggcagtctcacctcagatgacgaacatatgggacaaacaattggcaggatatgttgctgcaggctttaaagtgacagtattagccaccattggtcaacaaggaatacagttaatacaaaagactgttatgatcatcaacctgtggttgggagcacacctggttatttccggggatttaagtattggtcagttaattgcttttaatatgcttgctggtcagattgttgcaccggttattcgccttgcacaaatctggcaggatttccagcaggttggtatatcagttacccgccttggtgatgtgcttaactctccaactgaaagttatcatgggaaactggcattaccggaaattaatggtaatatcacttttcgtaatatccggtttcgctataagcctgactctccggttattttagataatatcaatctcagtattaagcagggggaggttattggtattgtcggacgttctggttcaggaaaaagcacattaactaaattaattcaacgtttttatattcctgaaaatggccaggtcttaattgatggacatgatcttgcgttggccgatcctaactggttacgtcgtcaggtgggggttgtgttgcaggacaatgtgctgcttaatcgcagtattattgataatatctcactggctaatcctggtatgtccgtcgaaaaagttatttatgcagcgaaattagcaggcgctcatgattttatttctgaattgcgtgaggggtataacaccattgtcggggaacagggggcaggattatccggaggtcaacgtcaacgcatcgcaattgcaagggcgctggtgaacaaccctaaaatacttatttttgatgaagcaaccagtgctctggattatgagtcggagcatatcatcatgcgcaatatgcacaaaatatgtaagggcagaacggttataatcattgctcatcgtctgtctacagtaaaaaatgcagaccgcattattgtcatggaaaaagggaaaattgttgaacagggtaaacataaggaactgctttctgaaccggaaagtttatacagttacttatatcagttacagtcagactaacagaaagaacagaagaatatgaaaacatggttaatggggttcagcgagttcctgttgcgctataaacttgtctggagtgaaacatggaaaatccggaagcaattagatactccggtacgtgaaaaggacgaaaatgaattcttacccgctcatctggaattaattgaaacgccggtatccagacggccgcgtctggttgcttattttattatggggtttctggttattgctgtcattttatctgttttaggtcaggtggaaattgttgccactgcaaatgggaaattaacactaagtgggcgcagcaaagaaattaaacctattgaaaactcaatagttaaagaaattatcgtaaaagaaggagagtcagtccggaaaggggatgtgttattaaagcttacagcactgggagctgaagctgatacgttaaaaacacagtcatcactgttacagaccaggctggaacaaactcggtatcaaattctgagcaggtcaattgaattaaataaactacctgaactgaagcttcctgatgagccttattttcagaatgtatctgaagaggaagtactgcgtttaacttctttgataaaagaacagttttccacatggcaaaatcagaagtatcaaaaagaactgaatctggataagaaaagagcagagcgattaacaatacttgcccgtataaaccgttatgaaaatttatcgagagttgaaaaaagccgtctggatgatttcaggagtttattgcataaacaggcaattgcaaaacatgctgtacttgagcaggagaataaatatgtcgaggcagcaaatgaattacgggtttataaatcgcaactggagcaaattgagagtgagatattgtctgcaaaagaagaatatcagcttgtcacgcagctttttaaaaatgaaattttagacaagctaagacaaacaacagacaacattgagttattaactctggagttagagaaaaatgaagagcgtcaacaggcttcagtaatcagggcccctgtttcgggaaaagttcagcaactgaaggttcatactgaaggtggggttgttacaacagcggaaacactgatggtcatcgttccggaagatgacacgctggaggttactgctctggtacaaaataaagatattggttttattaacgtcgggcagaatgccatcattaaagtggaggcctttccttacacccgatatggttatctggtgggtaaggtgaaaaatataaatttagatgcaatagaagaccagaaactgggactcgtttttaatgtcattgtttctgttgaagagaatgatttgtcaaccgggaataagcacattccattaagctcgggtatggctgtcactgcagaaataaagactggaatgcgaagcgtaatcagctatcttcttagtcctctggaagagtctgtaacagaaagtttacatgagcgttaagtctcagagccgcggtatccggctcatatcttctcctg

SEQ ID NO: 801 - DNA, 104 bp, Artificial Sequence
  Description of Artificial Sequence: Synthetic polynucleotide
agcgggaataaggggcagagaaaagagtatttcgtcgactaacaaaaaatggctgtttgtgaaaaaaattctaaaggttgttttacgacagacgataacagggt

SEQ ID NO: 802 - DNA, 45 bp, Artificial Sequence
  Description of Artificial Sequence: Synthetic oligonucleotide
tgacggcgattgagccgacgggtggaaacccaaaacgtaatcaac

SEQ ID NO: 803 - DNA, 96 bp, Artificial Sequence
  Description of Artificial Sequence: Synthetic oligonucleotide
atctaatctagacatcattaattcctaatttttgttgacactctatcattgatagagttattttaccactccctatcagtgatagagaaaagtgaa

SEQ ID NO: 804 - DNA, 705 bp, Artificial Sequence
  Description of Artificial Sequence: Synthetic polynucleotide
gaattcgttaagacccactttcacatttaagttgtttttctaatccgcatatgatcaattcaaggccgaataagaaggctggctctgcaccttggtgatcaaataattcgatagcttgtcgtaataatggcggcatactatcagtagtaggtgtttccctttcttctttagcgacttgatgctcttgatcttccaatacgcaacctaaagtaaaatgccccacagcgctgagtgcatataatgcattctctagtgaaaaaccttgttggcataaaaaggctaattgattttcgagagtttcatactgtttttctgtaggccgtgtacctaaatgtacttttgctccatcgcgatgacttagtaaagcacatctaaaacttttagcgttattacgtaaaaaatcttgccagctttccccttctaaagggcaaaagtgagtatggtgcctatctaacatctcaatggctaaggcgtcgagcaaagcccgcttattttttacatgccaatacaatgtaggctgctctacacctagcttctgggcgagtttacgggttgttaaaccttcgattccgacctcattaagcagctctaatgcgctgttaatcactttacttttatctaatctagacatcattaattcctaatttttgttgacactctatcatttatagagttaatttaccactccctatcagtgatagagaa

SEQ ID NO: 805 - DNA, 25 bp, Artificial Sequence
  Description of Artificial Sequence: Synthetic oligonucleotide
aaataaaaatgaggaggcaattcta

SEQ ID NO: 806 - DNA, 25 bp, Artificial Sequence
  Description of Artificial Sequence: Synthetic oligonucleotide
agattataaggagttaaatagaaaa

SEQ ID NO: 807 - DNA, 35 bp, Artificial Sequence
  Description of Artificial Sequence: Synthetic oligonucleotide
ctcaaagaattataggaaaggaggaagcgataagt

SEQ ID NO: 808 - DNA, 25 bp, Artificial Sequence
  Description of Artificial Sequence: Synthetic oligonucleotide
atcaccaatttgaggaaaggtaaat

SEQ ID NO: 809 - DNA, 25 bp, Artificial Sequence
  Description of Artificial Sequence: Synthetic oligonucleotide
tggcagacgcctaaggaggaagacc

SEQ ID NO: 810 - DNA, 25 bp, Artificial Sequence
  Description of Artificial Sequence: Synthetic oligonucleotide
tacataattttggggagggtactcg

SEQ ID NO: 811 - DNA, 25 bp, Artificial Sequence
  Description of Artificial Sequence: Synthetic oligonucleotide
ttaaatatcaactagaggtcaccaa

SEQ ID NO: 812 - DNA, 25 bp, Artificial Sequence
  Description of Artificial Sequence: Synthetic oligonucleotide
tacgatttaattcggaggttttttg

SEQ ID NO: 813 - DNA, 25 bp, Artificial Sequence
  Description of Artificial Sequence: Synthetic oligonucleotide
tcacaacgctgagagagagagaaat

SEQ ID NO: 814 - DNA, 25 bp, Artificial Sequence
  Description of Artificial Sequence: Synthetic oligonucleotide
gttaaattgaggaggaggcagttcc

SEQ ID NO: 815 - DNA, 25 bp, Artificial Sequence
  Description of Artificial Sequence: Synthetic oligonucleotide
tataccgaacgcttaaggaggcttt

SEQ ID NO: 816 - DNA, 25 bp, Artificial Sequence
  Description of Artificial Sequence: Synthetic oligonucleotide
ataaatcccttcatgaggaggtaag

SEQ ID NO: 817 - DNA, 25 bp, Artificial Sequence
  Description of Artificial Sequence: Synthetic oligonucleotide
gatagggaccaggtaaggaggatga

SEQ ID NO: 818 - DNA, 200 bp, Artificial Sequence
  Description of Artificial Sequence: Synthetic polynucleotide
tcgccgtaacctgattaactgagactgacggcaacgccaaattgcctgatgcgctgcgcttatcaggcctacaaggggaattgcaatttattgaatttgcacatttttgtaggccggataaggcgtttacgccgcatccggcaacatgaatggtaatttgccagcaacgtgcttccccgccaacggcggggttttttctg

SEQ ID NO: 819 - DNA, 96 bp, Artificial Sequence
  Description of Artificial Sequence: Synthetic oligonucleotide
ctctaacggacttgagtgaggttgtaaagggagttggctcctcggtaccaaattccagaaaagaggcctcccgaaaggggggccttttttcgtttt

SEQ ID NO: 820 - DNA, 38 bp, Artificial Sequence
  Description of Artificial Sequence: Synthetic oligonucleotide
gtctcagagccgcggtatccggctcatatcttctcctg

SEQ ID NO: 821 - DNA, 177 bp, Artificial Sequence
  Description of Artificial Sequence: Synthetic polynucleotide
atgaacaaagtatatagcctgaaatattgcccagtaactgggggtctgattgtagtcagtgaactggcatcccgcgtcatcaaaaaaacctgccgtcgtctgactcacatcctgctggcgggtattccggctgtgtatctgtactacccgcagatctcccaggcaggtatcgtccgc

SEQ ID NO: 822 - DNA, 921 bp, Artificial Sequence
  Description of Artificial Sequence: Synthetic polynucleotide
ttcaaagcggaggctgacaaggccgctgcagcaaaagctgactcctttatgaacgcgggttacaaaaacttcatgaccgaggtaaataatctcaataaacgtatgggtgatctgcgcgacactaatggggatgcaggcgcatgggcacgcattatgtctggtgcaggttcggcggatggcgggtattctgacaattacactcatgttcaggtgggcttcgataaaaaacatgagctggacggtgtggatctgttcactggcgtaaccatgacttatactgattcaagcgcagacagccacgcattttcaggtaaaacgaaatcagttggcggcggtctgtatgcgagcgcactgttcgagagcggcgcctacattgatctaattggcaagtatattcaccatgataatgattacacagggaactttgcaggcctgggcaccaaacactataacacgcattcatggtacgctggcgcagaaaccggctatagataccacctgaccgaggaaacctttatcgaaccgcaagcggaactggtttacggtgcggtcagtggcaagacctttcgttggaaagatggtgatatggatctgtcaatgaaaaaccgcgacttcagccccttgatcggccgcaccggcattgagctgggcaaaaccttctctggcaaagattggtctgttaccgcgcgtgcgggcacttcgtggcaatttgatctgctaaacaacggtgagactgtactgcgtgatgcgagtggcgaaaaacgtattaaaggtgaaaaagatagtagaatgctattcaacgtgggcatgaatgcgcagatcaaagataacatgcgttttgggttggagtttgaaaaatccgcgttcggtaaatataatgttgacaatgctgtgaacgcgaatttccgctacatgttttaa

SEQ ID NO: 823 - DNA, 729 bp, Artificial Sequence
  Description of Artificial Sequence: Synthetic polynucleotide
atgcaagtgcaactggtagagtccggtgggggcgtggtgcagccgggtcgcagcctgcgtctgtcgtgcgcggcgagtggttttacgttttcgagttatactatgcactgggttcgtcaagcgccgggcaaaggcctggaatgggttactttcatttcttacgatggtaataataaatattatgcggattctgtgaaaggtcgctttactatttcgcgcgataacagtaaaaacactctgtatctgcaaatgaattctctgcgtgcagaggatactgctatctattactgcgcgcgtacgggctggttgggcccgtttgattattggggccaaggcactttggttactgtgtcatcgggcgggggctctggcggtggttcaggtggtggcagtggtggtggcgagatcgtgttgactcaatctccgggtactctgtctctgtctccgggtgaacgcgcgaccctgtcttgccgcgcttctcagagtgttggttcatcgtatctggcatggtatcaacagaaaccgggtcaagcgccgcgtctgctgatttacggtgcttttagtcgcgcaaccgggattccggatcgattttctggttcaggttctggcactgactttactttgactattagtcgtctggaaccggaggacttcgcggtttattattgccaacagtatggttcttctccgtggacctttggtcaaggcactaaagttgaaattaaataa

SEQ ID NO: 824 - DNA, 729 bp, Artificial Sequence
  Description of Artificial Sequence: Synthetic polynucleotide
atggagattgtactgacccagagccctggtacattgtctttgtcgcctggtgaacgcgcgactctgtcttgtcgtgcgtctcagtctgttggtagttcgtatctggcgtggtatcaacaaaaaccgggccaagctccgcgtctgctgatttacggtgcatttagccgcgcgactggcattccggaccgcttttctgggtctggctcaggtaccgattttactctgactatttcgcgtctggagccggaggatttcgcggtttattactgccagcaatatggttctagtccgtggaccttcggccaaggtactaaagtggaaatcaaaggcgggggttcgggtggtggctctgggggtggctcgggcggtgggcaggtgcaactggttgagagtggtggcggcgttgttcaaccgggccgctctctgcgcctgtcgtgcgctgcttctggctttacctttagctcttatacgatgcactgggttcgccaagctccgggtaaaggtctggagtgggtgactttcatttcttacgatggtaacaacaaatattatgctgattctgttaaaggccgttttactatttctcgagacaatagcaaaaacactctgtacctgcagatgaattctctgcgcgctgaagacaccgcgatttattattgtgcgcgcactggttggctgggtccgtttgattattggggtcagggcacgctggttactgttagctcgtga

SEQ ID NO: 825 - DNA, 711 bp, Artificial Sequence
  Description of Artificial Sequence: Synthetic polynucleotide
atgcaggtgcaattggtggagtcgggtggcggcgtggtgcaaccgggtcgtagcctgcgcctggattgtaaagcgtcaggcatcacgtttagcaattctggcatgcactgggtgcgtcaagcgccgggcaaaggtctggagtgggttgcggtaatttggtacgatggttctaaacgctattacgcggatagtgtgaaaggtcgctttactatctctcgcgataattctaaaaacaccctgtttctgcaaatgaattcgttgcgtgcggaagatactgcggtatattattgtgctactaacgatgattattggggtcaaggcaccctggtgactgtttcgagcggcggtggtagcggcggcggctctggtggtggttctggtggcggtgagattgtgctgactcaaagcccggcgaccctgtctctgtcgccgggtgaacgcgctactctgagttgccgtgcgtcgcaaagcgtgtcttcttatctggcgtggtaccaacaaaaaccgggtcaagcgccgcgcctgctgatatatgatgctagtaatcgtgcaacgggtattccggcacgcttttcaggttctggcagcggcaccgatttcactctgactatctcgtcactggagccggaagactttgcggtttattattgtcagcaatcttctaattggccgcgtacgtttggtcagggcactaaagttgaaatcaaataa

SEQ ID NO: 826 - DNA, 711 bp, Artificial Sequence
  Description of Artificial Sequence: Synthetic polynucleotide
atggaaatcgttttaacgcagtcgccggcgactctgtctttgtcgcctggtgaacgtgctacgctgtcttgccgcgcgtcacagtctgtgtcgtcatatctggcttggtaccaacagaaaccgggccaagctccgcgcctgctgatttatgatgcgtctaatcgcgcgaccggcattccggcgcgtttttctggctccggctctggcaccgactttactctgactatttcgtctctggaaccggaagattttgcggtgtactattgccagcaatcttctaattggccgcgcacgtttggtcaaggtaccaaggttgagatcaaaggtggtggctcgggcggcggttcgggcggcggctcaggtggtggccaagttcagttggttgagtctggcgggggcgtagtacaaccgggtcgttctttgcgtctggattgcaaagcgagcggtattacctttagcaattcaggtatgcactgggtgcgccaagcgccgggcaaaggcctggaatgggttgcggtgatttggtacgatggctcgaaacgttattatgctgacagcgttaaaggtcgttttactattagccgtgataattccaaaaatacgctgtttctgcagatgaatagcctgcgtgctgaagacactgcggtttattactgtgctactaatgatgattactggggccagggcaccctggtgactgtgagttcttaa

SEQ ID NO: 827 - DNA, 729 bp, Artificial Sequence
  Description of Artificial Sequence: Synthetic polynucleotide
atggatattcagatgactcagagccctagctcactgtctgcgtcagttggcgatcgtgtgactattacctgtcgcgctagtcaggatgtgtctacggcggttgcgtggtatcaacagaaaccgggcaaagctccgaaactgttgatttattcagcgtctttcctgtattcgggtgtgccttctcgcttttcgggctctggtagcggtactgattttacgctgactattagttcactgcaaccggaggactttgcgacttattattgccaacaatacctgtatcacccggcgacctttggtcaaggcactaaagtggaaattaaacgcggcggcggcagcggtggcggctctggtggtgggtctggtggtggtgaggttcagctggttgagtctggtggtggtctggttcaacctgggggcagcctgcgcctgtcgtgcgcggcgtctggttttacgttctcagattcttggattcactgggtacgtcaagctccgggcaaaggtctggagtgggtggcgtggatttctccgtatggcggttcgacgtattacgcggactctgttaaagggcgttttacgatctcagcggatacttctaaaaatactgcgtatctgcaaatgaattctctgcgagcggaggataccgcggtgtattactgtgctcgccgccactggcctggtggtttcgattattggggtcaaggtaccctggtgactgtttcgtcttaa

SEQ ID NO: 828 - DNA, 729 bp, Artificial Sequence
  Description of Artificial Sequence: Synthetic polynucleotide
atggaagttcagctggtggagagtggtggcggtctggtgcagccgggcggctctctgcgtctgagctgtgcggcgtctggctttacgttttctgacagttggattcactgggtgcgccaagcaccgggcaaaggcctggagtgggtggcgtggatttctccgtatggcggtagtacttattatgctgattctgtgaaaggccgttttaccatttcggcggacacttcaaaaaataccgcgtatctgcaaatgaatagcctgcgcgctgaagacacggctgtttactactgtgctcgccgccactggccgggcggtttcgattattggggccaaggcactctggtgactgtgagctctggcggcgggtcgggtggcggttctggcggtggcagtggcggtggtgatattcaaatgacccaatctccgtcgtctctgagcgcgtctgtgggcgatcgtgtaaccattacttgtcgtgcgtcgcaggatgtgtctactgctgtggcgtggtatcagcaaaaaccgggtaaagctccgaaactgctgatttatagcgcttcttttctgtatagtggtgttccgtcacgttttagcggttcaggctctggtactgatttcacactgactatttcttctctgcaaccggaagatttcgcgacttattattgtcagcagtacttgtaccacccggcaacttttggtcagggcactaaagttgaaattaaacgttaa

SEQ ID NO: 829 - DNA, 1821 bp, Artificial Sequence
  Description of Artificial Sequence: Synthetic polynucleotide
atgaacaaagtatatagcctgaaatattgcccagtaactgggggtctgattgtagtcagtgaactggcatcccgcgtcatcaaaaaaacctgccgtcgtctgactcacatcctgctggcgggtattccggctgtgtatctgtactacccgcagatctcccaggcaggtatcgtccgccaggtacaattagttgagagcggcggcggtgtggttcaaccgggccgtagtctgcgattgtcttgtgctgcatctggttttactttcagttcttacacgatgcactgggttcgccaagctccgggcaaaggcctggagtgggttacctttatttcttacgatggcaataataagtattacgctgattctgtgaaaggtcgctttactattagccgagataactctaaaaatactctgtatctgcaaatgaattctctgcgtgcggaagatactgcgatctattattgtgcgcgtactggttggctgggcccgtttgattattggggccaaggcacgctggttactgttagttcgggcggcggttctggtggcggctctggtggtggctctggcggcggcgagattgtgctgactcaatctccgggcacgctgtcactgtctccgggtgaacgcgcgaccctgtcttgtcgcgcgagtcaaagtgttggttcttcttatctggcttggtatcagcaaaagcctggtcaagcgccgcgtctgttgatttatggcgcgttttcgcgcgcgactggcattccggaccgattttctggttctggttctggcactgatttcactctgaccatttcacgcctggaaccggaggattttgcggtgtactattgccaacaatatggctcatcgccgtggacgtttggccaaggtactaaagttgagattaaattcaaagcggaggctgacaaggccgctgcagcaaaagctgactcctttatgaacgcgggttacaaaaacttcatgaccgaggtaaataatctcaataaacgtatgggtgatctgcgcgacactaatggggatgcaggcgcatgggcacgcattatgtctggtgcaggttcggcggatggcgggtattctgacaattacactcatgttcaggtgggcttcgataaaaaacatgagctggacggtgtggatctgttcactggcgtaaccatgacttatactgattcaagcgcagacagccacgcattttcaggtaaaacgaaatcagttggcggcggtctgtatgcgagcgcactgttcgagagcggcgcctacattgatctaattggcaagtatattcaccatgataatgattacacagggaactttgcaggcctgggcaccaaacactataacacgcattcatggtacgctggcgcagaaaccggctatagataccacctgaccgaggaaacctttatcgaaccgcaagcggaactggtttacggtgcggtcagtggcaagacctttcgttggaaagatggtgatatggatctgtcaatgaaaaaccgcgacttcagccccttgatcggccgcaccggcattgagctgggcaaaaccttctctggcaaagattggtctgttaccgcgcgtgcgggcacttcgtggcaatttgatctgctaaacaacggtgagactgtactgcgtgatgcgagtggcgaaaaacgtattaaaggtgaaaaagatagtagaatgctattcaacgtgggcatgaatgcgcagatcaaagataacatgcgttttgggttggagtttgaaaaatccgcgttcggtaaatataatgttgacaatgctgtgaacgcgaatttccgctacatgttttaa

SEQ ID NO: 830 - DNA, 1821 bp, Artificial Sequence
  Description of Artificial Sequence: Synthetic polynucleotide
atgaacaaagtatatagcctgaaatattgcccagtaactgggggtctgattgtagtcagtgaactggcatcccgcgtcatcaaaaaaacctgccgtcgtctgactcacatcctgctggcgggtattccggctgtgtatctgtactacccgcagatctcccaggcaggtatcgtccgcgaaattgtactgacccagtcgcctggtaccctgtctctgtcgccgggtgaacgtgctaccctgtcttgtcgtgcttcgcaatcggttggctcgtcttatctggcatggtatcagcaaaaaccgggccaagcgcctcgtctgctgatttatggcgcgttttctcgtgctacgggcattcctgatcgtttttcgggctctggctctggtactgattttacgctgactatcagccgcttggaacctgaagattttgcggtttattattgccaacaatatggctcttctccgtggacgtttggtcaaggcactaaagttgaaattaaaggtggtggctcgggcggtggttctggtggtggtagtggtggtggtcaagtgcagttggttgaatcgggtggcggtgttgtgcagccgggccgttcgttgcgtctgtcttgcgcagcgagtggtttcaccttctcttcttatactatgcactgggtgcgtcaagcacctggcaaaggtctggagtgggtaacttttatttcatacgatggtaataataaatattatgcagattctgttaaaggtcgctttacgatttctcgcgataattcaaaaaatacgctgtatctgcagatgaattcgctgcgcgctgaggatactgcgatctactattgtgcgcgtactggttggctgggtccgtttgattactggggccaaggtacgctggttacagtttcgtcgttcaaagcggaggctgacaaggccgctgcagcaaaagctgactcctttatgaacgcgggttacaaaaacttcatgaccgaggtaaataatctcaataaacgtatgggtgatctgcgcgacactaatggggatgcaggcgcatgggcacgcattatgtctggtgcaggttcggcggatggcgggtattctgacaattacactcatgttcaggtgggcttcgataaaaaacatgagctggacggtgtggatctgttcactggcgtaaccatgacttatactgattcaagcgcagacagccacgcattttcaggtaaaacgaaatcagttggcggcggtctgtatgcgagcgcactgttcgagagcggcgcctacattgatctaattggcaagtatattcaccatgataatgattacacagggaactttgcaggcctgggcaccaaacactataacacgcattcatggtacgctggcgcagaaaccggctatagataccacctgaccgaggaaacctttatcgaaccgcaagcggaactggtttacggtgcggtcagtggcaagacctttcgttggaaagatggtgatatggatctgtcaatgaaaaaccgcgacttcagccccttgatcggccgcaccggcattgagctgggcaaaaccttctctggcaaagattggtctgttaccgcgcgtgcgggcacttcgtggcaatttgatctgctaaacaacggtgagactgtactgcgtgatgcgagtggcgaaaaacgtattaaaggtgaaaaagatagtagaatgctattcaacgtgggcatgaatgcgcagatcaaagataacatgcgttttgggttggagtttgaaaaatccgcgttcggtaaatataatgttgacaatgctgtgaacgcgaatttccgctacatgttttaa

SEQ ID NO: 831 - DNA, 1803 bp, Artificial Sequence
  Description of Artificial Sequence: Synthetic polynucleotide
atgaacaaagtatatagcctgaaatattgcccagtaactgggggtctgattgtagtcagtgaactggcatcccgcgtcatcaaaaaaacctgccgtcgtctgactcacatcctgctggcgggtattccggctgtgtatctgtactacccgcagatctcccaggcaggtatcgtccgccaagtacaactggttgaatccggcggaggagtggtgcaaccgggccgcagtttgcgtctggattgtaaagcttcaggcatcactttttctaattctggtatgcactgggttcgccaagctccgggtaaaggtctggagtgggttgcggtgatctggtatgatggttctaaacgatattatgcggatagtgttaagggtcgttttactatttctcgtgataattctaagaacaccttgtttctgcagatgaatagtctgcgcgctgaggatactgcggtatattattgtgcgactaatgacgattattggggccaaggcacgctggttaccgtgagctctggtggtggttcgggtggtggttctggtggtgggagcggcggtggcgagatcgttctgactcaaagcccggcgactctgagtctgagtccgggtgaacgtgcgactctgagctgccgtgcgtctcagagtgtgtcgagttatctggcgtggtaccaacaaaaaccgggccaggcgccgcgactgctgatttatgatgcttctaatcgtgcgactggtattccggcgcgctttagcggttctggctcaggcactgacttcactctgactatttcttcgctggaaccggaagattttgcggtgtactattgtcaacaatcatctaattggcctcgtacgttcggtcaaggtacaaaagtggagataaaattcaaagcggaggctgacaaggccgctgcagcaaaagctgactcctttatgaacgcgggttacaaaaacttcatgaccgaggtaaataatctcaataaacgtatgggtgatctgcgcgacactaatggggatgcaggcgcatgggcacgcattatgtctggtgcaggttcggcggatggcgggtattctgacaattacactcatgttcaggtgggcttcgataaaaaacatgagctggacggtgtggatctgttcactggcgtaaccatgacttatactgattcaagcgcagacagccacgcattttcaggtaaaacgaaatcagttggcggcggtctgtatgcgagcgcactgttcgagagcggcgcctacattgatctaattggcaagtatattcaccatgataatgattacacagggaactttgcaggcctgggcaccaaacactataacacgcattcatggtacgctggcgcagaaaccggctatagataccacctgaccgaggaaacctttatcgaaccgcaagcggaactggtttacggtgcggtcagtggcaagacctttcgttggaaagatggtgatatggatctgtcaatgaaaaaccgcgacttcagccccttgatcggccgcaccggcattgagctgggcaaaaccttctctggcaaagattggtctgttaccgcgcgtgcgggcacttcgtggcaatttgatctgctaaacaacggtgagactgtactgcgtgatgcgagtggcgaaaaacgtattaaaggtgaaaaagatagtagaatgctattcaacgtgggcatgaatgcgcagatcaaagataacatgcgttttgggttggagtttgaaaaatccgcgttcggtaaatataatgttgacaatgctgtgaacgcgaatttccgctacatgttttaa

SEQ ID NO: 832 - DNA, 1803 bp, Artificial Sequence
  Description of Artificial Sequence: Synthetic polynucleotide
atgaacaaagtatatagcctgaaatattgcccagtaactgggggtctgattgtagtcagtgaactggcatcccgcgtcatcaaaaaaacctgccgtcgtctgactcacatcctgctggcgggtattccggctgtgtatctgtactacccgcagatctcccaggcaggtatcgtccgcgaaatcgtgctgactcagagtccggcgactctgtctctgagtccgggcgaacgcgcgactctgtcttgccgtgcgtctcaatctgtgtcttcatacttggcttggtaccaacaaaaaccgggccaggcgccgcgactgttgatttatgatgcgtcgaatcgcgcgactggcattccggcgcgcttttcgggtagcggttctggtactgattttacgctgactatctcttctctggagcctgaagatttcgctgtttattactgccaacagtctagtaattggccgcgtactttcggccagggcactaaggtggaaattaaaggtggcggctcgggcggcggctcgggtggtggttctggtggtggccaagtgcaactggtggaaagtggcggcggggtggtgcaaccgggccgttctctgcgcctggattgtaaagcttcaggcattacttttagcaactctggtatgcactgggttcgccaagctccgggcaaaggcctggaatgggtggcggttatttggtacgatggctctaaacgttattacgctgacagtgttaaaggccgctttaccatttctcgtgataattctaaaaataccctgtttctgcaaatgaactcgctgcgcgcggaagatactgctgtttactattgtgcgactaatgatgattactggggtcaaggtaccctggttaccgtgtcttctttcaaagcggaggctgacaaggccgctgcagcaaaagctgactcctttatgaacgcgggttacaaaaacttcatgaccgaggtaaataatctcaataaacgtatgggtgatctgcgcgacactaatggggatgcaggcgcatgggcacgcattatgtctggtgcaggttcggcggatggcgggtattctgacaattacactcatgttcaggtgggcttcgataaaaaacatgagctggacggtgtggatctgttcactggcgtaaccatgacttatactgattcaagcgcagacagccacgcattttcaggtaaaacgaaatcagttggcggcggtctgtatgcgagcgcactgttcgagagcggcgcctacattgatctaattggcaagtatattcaccatgataatgattacacagggaactttgcaggcctgggcaccaaacactataacacgcattcatggtacgctggcgcagaaaccggctatagataccacctgaccgaggaaacctttatcgaaccgcaagcggaactggtttacggtgcggtcagtggcaagacctttcgttggaaagatggtgatatggatctgtcaatgaaaaaccgcgacttcagccccttgatcggccgcaccggcattgagctgggcaaaaccttctctggcaaagattggtctgttaccgcgcgtgcgggcacttcgtggcaatttgatctgctaaacaacggtgagactgtactgcgtgatgcgagtggcgaaaaacgtattaaaggtgaaaaagatagtagaatgctattcaacgtgggcatgaatgcgcagatcaaagataacatgcgttttgggttggagtttgaaaaatccgcgttcggtaaatataatgttgacaatgctgtgaacgcgaatttccgctacatgttttaa

SEQ ID NO: 833 - DNA, 1821 bp, Artificial Sequence
  Description of Artificial Sequence: Synthetic polynucleotide
atgaacaaagtatatagcctgaaatattgcccagtaactgggggtctgattgtagtcagtgaactggcatcccgcgtcatcaaaaaaacctgccgtcgtctgactcacatcctgctggcgggtattccggctgtgtatctgtactacccgcagatctcccaggcaggtatcgtccgcgatattcaaatgactcaatctccgagctctctgagtgcgtctgtgggtgatcgtgtgactattacttgtcgtgcgtctcaagatgtttcaactgcggttgcgtggtatcaacagaaaccgggcaaggcgcctaagctgctgatttattctgcttcgttcctgtacagcggtgtgccgtctcgtttctctggctctggttcgggtactgatttcactctgactatttcgagtctgcagccggaagattttgcgacttattattgtcaacaatatctgtatcaccctgcgacgtttggtcaaggcacgaaagttgaaattaaacgtggtggtggctctggtggtggcagcggtggtgggtcgggtggcggtgaagttcaactggttgagtcaggtggtggcctggtgcaaccgggcggctctctgcgcctgtcttgtgctgcgtcgggttttacgttctctgatagctggattcactgggtacgccaggcaccgggcaaaggtctggaatgggtagcttggatttcaccttatggtggctctacttattacgcggatagcgtgaaaggtcgctttactatttctgcggacactagcaaaaatactgcttacctgcaaatgaattcgctgcgtgctgaggatactgcagtgtattactgtgcgcgtcgtcattggcctggcggctttgattattggggtcaaggtactctggttactgttagcagcttcaaagcggaggctgacaaggccgctgcagcaaaagctgactcctttatgaacgcgggttacaaaaacttcatgaccgaggtaaataatctcaataaacgtatgggtgatctgcgcgacactaatggggatgcaggcgcatgggcacgcattatgtctggtgcaggttcggcggatggcgggtattctgacaattacactcatgttcaggtgggcttcgataaaaaacatgagctggacggtgtggatctgttcactggcgtaaccatgacttatactgattcaagcgcagacagccacgcattttcaggtaaaacgaaatcagttggcggcggtctgtatgcgagcgcactgttcgagagcggcgcctacattgatctaattggcaagtatattcaccatgataatgattacacagggaactttgcaggcctgggcaccaaacactataacacgcattcatggtacgctggcgcagaaaccggctatagataccacctgaccgaggaaacctttatcgaaccgcaagcggaactggtttacggtgcggtcagtggcaagacctttcgttggaaagatggtgatatggatctgtcaatgaaaaaccgcgacttcagccccttgatcggccgcaccggcattgagctgggcaaaaccttctctggcaaagattggtctgttaccgcgcgtgcgggcacttcgtggcaatttgatctgctaaacaacggtgagactgtactgcgtgatgcgagtggcgaaaaacgtattaaaggtgaaaaagatagtagaatgctattcaacgtgggcatgaatgcgcagatcaaagataacatgcgttttgggttggagtttgaaaaatccgcgttcggtaaatataatgttgacaatgctgtgaacgcgaatttccgctacatgttttaa

SEQ ID NO: 834 - DNA, 1821 bp, Artificial Sequence
  Description of Artificial Sequence: Synthetic polynucleotide
atgaacaaagtatatagcctgaaatattgcccagtaactgggggtctgattgtagtcagtgaactggcatcccgcgtcatcaaaaaaacctgccgtcgtctgactcacatcctgctggcgggtattccggctgtgtatctgtactacccgcagatctcccaggcaggtatcgtccgcgaagtgcagctggtggagtcaggtggaggcttggtgcaaccgggcggttcactgcgtctgtcatgtgcggcgtctgggtttacttttagtgactcttggattcactgggtgcgccaggctccgggtaaaggcctggaatgggtagcttggattagtccttacggtggctcgacctattatgctgattcggtaaagggtcgctttactattagcgctgatacttctaaaaatactgcatacctgcagatgaatagcctgcgcgctgaggatactgctgtgtattattgcgcgcgtcgccactggccgggcggctttgattattggggccaaggtactctggttaccgtgtctagtggcggtggtagcggcggcggctcaggtggcggctcgggcggtggcgacattcagatgactcagtctccgtcttctttgtcggcgagcgtgggcgatcgtgttaccatcacgtgtcgcgcgagccaagatgtgtcgactgcggtggcttggtatcaacaaaaaccgggtaaagctccgaaactgctgatttatagtgcgtcttttttgtattctggtgttccgtctcgtttctctggctcaggtagcggtactgattttacgctgactatttcttcactgcaaccggaagattttgctacgtattattgtcaacaatatctgtatcacccggcgacgtttggtcagggtactaaggtggagataaaacgcttcaaagcggaggctgacaaggccgctgcagcaaaagctgactcctttatgaacgcgggttacaaaaacttcatgaccgaggtaaataatctcaataaacgtatgggtgatctgcgcgacactaatggggatgcaggcgcatgggcacgcattatgtctggtgcaggttcggcggatggcgggtattctgacaattacactcatgttcaggtgggcttcgataaaaaacatgagctggacggtgtggatctgttcactggcgtaaccatgacttatactgattcaagcgcagacagccacgcattttcaggtaaaacgaaatcagttggcggcggtctgtatgcgagcgcactgttcgagagcggcgcctacattgatctaattggcaagtatattcaccatgataatgattacacagggaactttgcaggcctgggcaccaaacactataacacgcattcatggtacgctggcgcagaaaccggctatagataccacctgaccgaggaaacctttatcgaaccgcaagcggaactggtttacggtgcggtcagtggcaagacctttcgttggaaagatggtgatatggatctgtcaatgaaaaaccgcgacttcagccccttgatcggccgcaccggcattgagctgggcaaaaccttctctggcaaagattggtctgttaccgcgcgtgcgggcacttcgtggcaatttgatctgctaaacaacggtgagactgtactgcgtgatgcgagtggcgaaaaacgtattaaaggtgaaaaagatagtagaatgctattcaacgtgggcatgaatgcgcagatcaaagataacatgcgttttgggttggagtttgaaaaatccgcgttcggtaaatataatgttgacaatgctgtgaacgcgaatttccgctacatgttttaa

SEQ ID NO: 835 - DNA, 885 bp, Artificial Sequence
  Description of Artificial Sequence: Synthetic polynucleotide
atgcaggtacaattagttgagagcggcggcggtgtggttcaaccgggccgtagtctgcgattgtcttgtgctgcatctggttttactttcagttcttacacgatgcactgggttcgccaagctccgggcaaaggcctggagtgggttacctttatttcttacgatggcaataataagtattacgctgattctgtgaaaggtcgctttactattagccgagataactctaaaaatactctgtatctgcaaatgaattctctgcgtgcggaagatactgcgatctattattgtgcgcgtactggttggctgggcccgtttgattattggggccaaggcacgctggttactgttagttcgggcggcggttctggtggcggctctggtggtggctctggcggcggcgagattgtgctgactcaatctccgggcacgctgtcactgtctccgggtgaacgcgcgaccctgtcttgtcgcgcgagtcaaagtgttggttcttcttatctggcttggtatcagcaaaagcctggtcaagcgccgcgtctgttgatttatggcgcgttttcgcgcgcgactggcattccggaccgattttctggttctggttctggcactgatttcactctgaccatttcacgcctggaaccggaggattttgcggtgtactattgccaacaatatggctcatcgccgtggacgtttggccaaggtactaaagttgagattaaacttaatccattaattaatgaaatcagcaaaatcatttcagctgcaggtaattttgatgttaaagaggaaagagctgcagcttctttattgcagttgtccggtaatgccagtgatttttcatatggacggaactcaataactttgacagcatcagcataa

SEQ ID NO: 836 - DNA, 885 bp, Artificial Sequence
  Description of Artificial Sequence: Synthetic polynucleotide
atggaaattgtactgacccagtcgcctggtaccctgtctctgtcgccgggtgaacgtgctaccctgtcttgtcgtgcttcgcaatcggttggctcgtcttatctggcatggtatcagcaaaaaccgggccaagcgcctcgtctgctgatttatggcgcgttttctcgtgctacgggcattcctgatcgtttttcgggctctggctctggtactgattttacgctgactatcagccgcttggaacctgaagattttgcggtttattattgccaacaatatggctcttctccgtggacgtttggtcaaggcactaaagttgaaattaaaggtggtggctcgggcggtggttctggtggtggtagtggtggtggtcaagtgcagttggttgaatcgggtggcggtgttgtgcagccgggccgttcgttgcgtctgtcttgcgcagcgagtggtttcaccttctcttcttatactatgcactgggtgcgtcaagcacctggcaaaggtctggagtgggtaacttttatttcatacgatggtaataataaatattatgcagattctgttaaaggtcgctttacgatttctcgcgataattcaaaaaatacgctgtatctgcagatgaattcgctgcgcgctgaggatactgcgatctactattgtgcgcgtactggttggctgggtccgtttgattactggggccaaggtacgctggttacagtttcgtcgcttaatccattaattaatgaaatcagcaaaatcatttcagctgcaggtaattttgatgttaaagaggaaagagctgcagcttctttattgcagttgtccggtaatgccagtgatttttcatatggacggaactcaataactttgacagcatcagcataa

SEQ ID NO: 837 - DNA, 867 bp, Artificial Sequence
  Description of Artificial Sequence: Synthetic polynucleotide
atgcaagtacaactggttgaatccggcggaggagtggtgcaaccgggccgcagtttgcgtctggattgtaaagcttcaggcatcactttttctaattctggtatgcactgggttcgccaagctccgggtaaaggtctggagtgggttgcggtgatctggtatgatggttctaaacgatattatgcggatagtgttaagggtcgttttactatttctcgtgataattctaagaacaccttgtttctgcagatgaatagtctgcgcgctgaggatactgcggtatattattgtgcgactaatgacgattattggggccaaggcacgctggttaccgtgagctctggtggtggttcgggtggtggttctggtggtgggagcggcggtggcgagatcgttctgactcaaagcccggcgactctgagtctgagtccgggtgaacgtgcgactctgagctgccgtgcgtctcagagtgtgtcgagttatctggcgtggtaccaacaaaaaccgggccaggcgccgcgactgctgatttatgatgcttctaatcgtgcgactggtattccggcgcgctttagcggttctggctcaggcactgacttcactctgactatttcttcgctggaaccggaagattttgcggtgtactattgtcaacaatcatctaattggcctcgtacgttcggtcaaggtacaaaagtggagataaaacttaatccattaattaatgaaatcagcaaaatcatttcagctgcaggtaattttgatgttaaagaggaaagagctgcagcttctttattgcagttgtccggtaatgccagtgatttttcatatggacggaactcaataactttgacagcatcagcataa

SEQ ID NO: 838 - DNA, 867 bp, Artificial Sequence
  Description of Artificial Sequence: Synthetic polynucleotide
atggaaatcgtgctgactcagagtccggcgactctgtctctgagtccgggcgaacgcgcgactctgtcttgccgtgcgtctcaatctgtgtcttcatacttggcttggtaccaacaaaaaccgggccaggcgccgcgactgttgatttatgatgcgtcgaatcgcgcgactggcattccggcgcgcttttcgggtagcggttctggtactgattttacgctgactatctcttctctggagcctgaagatttcgctgtttattactgccaacagtctagtaattggccgcgtactttcggccagggcactaaggtggaaattaaaggtggcggctcgggcggcggctcgggtggtggttctggtggtggccaagtgcaactggtggaaagtggcggcggggtggtgcaaccgggccgttctctgcgcctggattgtaaagcttcaggcattacttttagcaactctggtatgcactgggttcgccaagctccgggcaaaggcctggaatgggtggcggttatttggtacgatggctctaaacgttattacgctgacagtgttaaaggccgctttaccatttctcgtgataattctaaaaataccctgtttctgcaaatgaactcgctgcgcgcggaagatactgctgtttactattgtgcgactaatgatgattactggggtcaaggtaccctggttaccgtgtcttctcttaatccattaattaatgaaatcagcaaaatcatttcagctgcaggtaattttgatgttaaagaggaaagagctgcagcttctttattgcagttgtccggtaatgccagtgatttttcatatggacggaactcaataactttgacagcatcagcataa

SEQ ID NO: 839 - DNA, 885 bp, Artificial Sequence
  Description of Artificial Sequence: Synthetic polynucleotide
atggatattcaaatgactcaatctccgagctctctgagtgcgtctgtgggtgatcgtgtgactattacttgtcgtgcgtctcaagatgtttcaactgcggttgcgtggtatcaacagaaaccgggcaaggcgcctaagctgctgatttattctgcttcgttcctgtacagcggtgtgccgtctcgtttctctggctctggttcgggtactgatttcactctgactatttcgagtctgcagccggaagattttgcgacttattattgtcaacaatatctgtatcaccctgcgacgtttggtcaaggcacgaaagttgaaattaaacgtggtggtggctctggtggtggcagcggtggtgggtcgggtggcggtgaagttcaactggttgagtcaggtggtggcctggtgcaaccgggcggctctctgcgcctgtcttgtgctgcgtcgggttttacgttctctgatagctggattcactgggtacgccaggcaccgggcaaaggtctggaatgggtagcttggatttcaccttatggtggctctacttattacgcggatagcgtgaaaggtcgctttactatttctgcggacactagcaaaaatactgcttacctgcaaatgaattcgctgcgtgctgaggatactgcagtgtattactgtgcgcgtcgtcattggcctggcggctttgattattggggtcaaggtactctggttactgttagcagccttaatccattaattaatgaaatcagcaaaatcatttcagctgcaggtaattttgatgttaaagaggaaagagctgcagcttctttattgcagttgtccggtaatgccagtgatttttcatatggacggaactcaataactttgacagcatcagcataa

SEQ ID NO: 840 - DNA, 885 bp, Artificial Sequence
  Description of Artificial Sequence: Synthetic polynucleotide
atggaagtgcagctggtggagtcaggtggaggcttggtgcaaccgggcggttcactgcgtctgtcatgtgcggcgtctgggtttacttttagtgactcttggattcactgggtgcgccaggctccgggtaaaggcctggaatgggtagcttggattagtccttacggtggctcgacctattatgctgattcggtaaagggtcgctttactattagcgctgatacttctaaaaatactgcatacctgcagatgaatagcctgcgcgctgaggatactgctgtgtattattgcgcgcgtcgccactggccgggcggctttgattattggggccaaggtactctggttaccgtgtctagtggcggtggtagcggcggcggctcaggtggcggctcgggcggtggcgacattcagatgactcagtctccgtcttctttgtcggcgagcgtgggcgatcgtgttaccatcacgtgtcgcgcgagccaagatgtgtcgactgcggtggcttggtatcaacaaaaaccgggtaaagctccgaaactgctgatttatagtgcgtcttttttgtattctggtgttccgtctcgtttctctggctcaggtagcggtactgattttacgctgactatttcttcactgcaaccggaagattttgctacgtattattgtcaacaatatctgtatcacccggcgacgtttggtcagggtactaaggtggagataaaacgccttaatccattaattaatgaaatcagcaaaatcatttcagctgcaggtaattttgatgttaaagaggaaagagctgcagcttctttattgcagttgtccggtaatgccagtgatttttcatatggacggaactcaataactttgacagcatcagcataa

SEQ ID NO: 841 - DNA, 159 bp, Artificial Sequence; identical to SEQ ID NO: 394
  Description of Artificial Sequence: Synthetic polynucleotide

SEQ ID NO: 842 - DNA, 2124 bp, Artificial Sequence
  Description of Artificial Sequence: Synthetic polynucleotide
atggattcttgtcataaaattgattatgggttatacgccctggagattttagcccaataccataacgtctctgttaacccggaagaaattaaacatagatttgacacagacgggactggtctgggattaacgtcatggttgcttgctgcgaaatctttagaactaaaggtaaaacaggtaaaaaaaacaattgaccgattaaactttatttctttgcccgcattagtctggagagaggatggacgtcattttattctgactaaagtcagtaaagaagcaaacagatatcttatttttgatctggagcaacgaaatccccgtgttctcgaacagtctgagtttgaggcgttatatcaggggcatattattcttattgcttcccgttcttctgttaccgggaaactggcaaaatttgactttacctggtttatccctgccattataaaatacagaaaaatatttattgaaacccttgttgtatctgtttttttacaattatttgcattaataaccccccttttttttcaggtggttatggacaaagtattagtacacagggggttttcaacccttaatgttattactgtcgcattatctgttgtggtggtgtttgagattatactcagcggtttaagaacttacatttttgcacatagtacaagtcggattgatgttgagttgggtgccaaactcttccggcatttactggcgctaccgatctcttattttgagagtcgtcgtgttggtgatactgttgccagggtaagagaattagaccagatccgtaattttctgacaggacaggcattaacatctgttctggacttattattttcattcatattttttgcggtaatgtggtattacagcccaaagcttactctggtgatcttattttcgctgccctgttatgctgcatggtctgtttttattagccccattttgcgacgtcgccttgatgataagttttcacggaatgcggataatcaatctttcctggtggaatcagtcacggcgattaacactataaaagctatggcagtctcacctcagatgacgaacatatgggacaaacaattggcaggatatgttgctgcaggctttaaagtgacagtattagccaccattggtcaacaaggaatacagttaatacaaaagactgttatgatcatcaacctgtggttgggagcacacctggttatttccggggatttaagtattggtcagttaattgcttttaatatgcttgctggtcagattgttgcaccggttattcgccttgcacaaatctggcaggatttccagcaggttggtatatcagttacccgccttggtgatgtgcttaactctccaactgaaagttatcatgggaaactggcattaccggaaattaatggtaatatcacttttcgtaatatccggtttcgctataagcctgactctccggttattttagataatatcaatctcagtattaagcagggggaggttattggtattgtcggacgttctggttcaggaaaaagcacattaactaaattaattcaacgtttttatattcctgaaaatggccaggtcttaattgatggacatgatcttgcgttggccgatcctaactggttacgtcgtcaggtgggggttgtgttgcaggacaatgtgctgcttaatcgcagtattattgataatatctcactggctaatcctggtatgtccgtcgaaaaagttatttatgcagcgaaattagcaggcgctcatgattttatttctgaattgcgtgaggggtataacaccattgtcggggaacagggggcaggattatccggaggtcaacgtcaacgcatcgcaattgcaagggcgctggtgaacaaccctaaaatacttatttttgatgaagcaaccagtgctctggattatgagtcggagcatatcatcatgcgcaatatgcacaaaatatgtaagggcagaacggttataatcattgctcatcgtctgtctacagtaaaaaatgcagaccgcattattgtcatggaaaaagggaaaattgttgaacagggtaaacataaggaactgctttctgaaccggaaagtttatacagttacttatatcagttacagtcagactaa

SEQ ID NO: 843 - DNA, 1437 bp, Artificial Sequence
  Description of Artificial Sequence: Synthetic polynucleotide
atgaaaacatggttaatggggttcagcgagttcctgttgcgctataaacttgtctggagtgaaacatggaaaatccggaagcaattagatactccggtacgtgaaaaggacgaaaatgaattcttacccgctcatctggaattaattgaaacgccggtatccagacggccgcgtctggttgcttattttattatggggtttctggttattgctgtcattttatctgttttaggtcaggtggaaattgttgccactgcaaatgggaaattaacactaagtgggcgcagcaaagaaattaaacctattgaaaactcaatagttaaagaaattatcgtaaaagaaggagagtcagtccggaaaggggatgtgttattaaagcttacagcactgggagctgaagctgatacgttaaaaacacagtcatcactgttacagaccaggctggaacaaactcggtatcaaattctgagcaggtcaattgaattaaataaactacctgaactgaagcttcctgatgagccttattttcagaatgtatctgaagaggaagtactgcgtttaacttctttgataaaagaacagttttccacatggcaaaatcagaagtatcaaaaagaactgaatctggataagaaaagagcagagcgattaacaatacttgcccgtataaaccgttatgaaaatttatcgagagttgaaaaaagccgtctggatgatttcaggagtttattgcataaacaggcaattgcaaaacatgctgtacttgagcaggagaataaatatgtcgaggcagcaaatgaattacgggtttataaatcgcaactggagcaaattgagagtgagatattgtctgcaaaagaagaatatcagcttgtcacgcagctttttaaaaatgaaattttagacaagctaagacaaacaacagacaacattgagttattaactctggagttagagaaaaatgaagagcgtcaacaggcttcagtaatcagggcccctgtttcgggaaaagttcagcaactgaaggttcatactgaaggtggggttgttacaacagcggaaacactgatggtcatcgttccggaagatgacacgctggaggttactgctctggtacaaaataaagatattggttttattaacgtcgggcagaatgccatcattaaagtggaggcctttccttacacccgatatggttatctggtgggtaaggtgaaaaatataaatttagatgcaatagaagaccagaaactgggactcgtttttaatgtcattgtttctgttgaagagaatgatttgtcaaccgggaataagcacattccattaagctcgggtatggctgtcactgcagaaataaagactggaatgcgaagcgtaatcagctatcttcttagtcctctggaagagtctgtaacagaaagtttacatgagcgttaa

SEQ ID NO: 844 - protein, 119 aa, Artificial Sequence
  Description of Artificial Sequence: Synthetic polypeptide
MQVQLVESGGGVVQPGRSLRLSCAASGFTFSSYTMHWVRQAPGKGLEWVTFISYDGNNKYYADSVKGRFTISRDNSKNTLYLQMNSLRAEDTAIYYCARTGWLGPFDYWGQGTLVTVSS

SEQ ID NO: 845 - protein, 108 aa, Artificial Sequence
  Description of Artificial Sequence: Synthetic polypeptide
EIVLTQSPGTLSLSPGERATLSCRASQSVGSSYLAWYQQKPGQAPRLLIYGAFSRATGIPDRFSGSGSGTDFTLTISRLEPEDFAVYYCQQYGSSPWTFGQGTKVEIK

SEQ ID NO: 846 - protein, 114 aa, Artificial Sequence
  Description of Artificial Sequence: Synthetic polypeptide
MQVQLVESGGGVVQPGRSLRLDCKASGITFSNSGMHWVRQAPGKGLEWVAVIWYDGSKRYYADSVKGRFTISRDNSKNTLFLQMNSLRAEDTAVYYCATNDDYWGQGTLVTVSS

SEQ ID NO: 847 - protein, 107 aa, Artificial Sequence [sequence omitted]

SEQ ID NO: 848 - protein, 109 aa, Artificial Sequence
  Description of Artificial Sequence: Synthetic polypeptide
MDIQMTQSPSSLSASVGDRVTITCRASQDVSTAVAWYQQKPGKAPKLLIYSASFLYSGVPSRFSGSGSGTDFTLTISSLQPEDFATYYCQQYLYHPATFGQGTKVEIKR

SEQ ID NO: 849 - protein, 118 aa, Artificial Sequence [sequence omitted]

SEQ ID NO: 850 - protein, 15 aa, Artificial Sequence
  Description of Artificial Sequence: Synthetic peptide
GGGSGGGSGGGSGGG

SEQ ID NO: 851 - protein, 59 aa, Artificial Sequence
  Description of Artificial Sequence: Synthetic polypeptide
MNKVYSLKYCPVTGGLIVVSELASRVIKKTCRRLTHILLAGIPAVYLYYPQISQAGIVR

SEQ ID NO: 852 - protein, 162 aa, Artificial Sequence
  Description of Artificial Sequence: Synthetic polypeptide
FKAEADKAAAAKADSFMNAGYKNFMTEVNNLNKRMGDLRDTNGDAGAWARIMSGAGSADGGYSDNYTHVQVGFDKKHELDGVDLFTGVTMTYTDSSADSHAFSGKTKSVGGGLYASALFESGAYIDLIGKYIHHDNDYTGNFAGLGTKHYNTHSWYAGAETG

SEQ ID NO: 853 - protein, 52 aa, Artificial Sequence; identical to SEQ ID NO: 393
  Description of Artificial Sequence: Synthetic polypeptide

SEQ ID NO: 854 - protein, 707 aa, Artificial Sequence
  Description of Artificial Sequence: Synthetic polypeptide
MDSCHKIDYGLYALEILAQYHNVSVNPEEIKHRFDTDGTGLGLTSWLLAAKSLELKVKQVKKTIDRLNFISLPALVWREDGRHFILTKVSKEANRYLIFDLEQRNPRVLEQSEFEALYQGHIILIASRSSVTGKLAKFDFTWFIPAIIKYRKIFIETLVVSVFLQLFALITPLFFQVVMDKVLVHRGFSTLNVITVALSVVVVFEIILSGLRTYIFAHSTSRIDVELGAKLFRHLLALPISYFESRRVGDTVARVRELDQIRNFLTGQALTSVLDLLFSFIFFAVMWYYSPKLTLVILFSLPCYAAWSVFISPILRRRLDDKFSRNADNQSFLVESVTAINTIKAMAVSPQMTNIWDKQLAGYVAAGFKVTVLATIGQQGIQLIQKTVMIINLWLGAHLVISGDLSIGQLIAFNMLAGQIVAPVIRLAQIWQDFQQVGISVTRLGDVLNSPTESYHGKLALPEINGNITFRNIRFRYKPDSPVILDNINLSIKQGEVIGIVGRSGSGKSTLTKLIQRFYIPENGQVLIDGHDLALADPNWLRRQVGVVLQDNVLLNRSIIDNISLANPGMSVEKVIYAAKLAGAHDFISELREGYNTIVGEQGAGLSGGQRQRIAIARALVNNPKILIFDEATSALDYESEHIIMRNMHKICKGRTVIIIAHRLSTVKNADRIIVMEKGKIVEQGKHKELLSEPESLYSYLYQLQSD

SEQ ID NO: 855 - protein, 478 aa, Artificial Sequence
  Description of Artificial Sequence: Synthetic polypeptide
MKTWLMGFSEFLLRYKLVWSETWKIRKQLDTPVREKDENEFLPAHLELIETPVSRRPRLVAYFIMGFLVIAVILSVLGQVEIVATANGKLTLSGRSKEIKPIENSIVKEIIVKEGESVRKGDVLLKLTALGAEADTLKTQSSLLQTRLEQTRYQILSRSIELNKLPELKLPDEPYFQNVSEEEVLRLTSLIKEQFSTWQNQKYQKELNLDKKRAERLTILARINRYENLSRVEKSRLDDFRSLLHKQAIAKHAVLEQENKYVEAANELRVYKSQLEQIESEILSAKEEYQLVTQLFKNEILDKLRQTTDNIELLTLELEKNEERQQASVIRAPVSGKVQQLKVHTEGGVVTTAETLMVIVPEDDTLEVTALVQNKDIGFINVGQNAIIKVEAFPYTRYGYLVGKVKNINLDAIEDQKLGLVFNVIVSVEENDLSTGNKHIPLSSGMAVTAEIKTGMRSVISYLLSPLEESVTESLHER

SEQ ID NO: 856-893 - skipped (38 entries)

SEQ ID NO: 894 - DNA, 138 bp, Artificial Sequence
  Description of Artificial Sequence: Synthetic polynucleotide
tgacggcgattgagccgacgggtggaaacccaaaacgtaatcaacgtgggtactccttaaattgggttcgaatggaccatggcacaagtcattaataccaacagcctctcgctgatcactcaaaataatatcaacaag

SEQ ID NO: 895 - DNA, 70 bp, Artificial Sequence
  Description of Artificial Sequence: Synthetic oligonucleotide
tgacggcgattgagccgacgggtggaaacccaaaacgtaatcaactacgaacacttacaggaggtaccca

SEQ ID NO: 896 - DNA, 70 bp, Artificial Sequence
  Description of Artificial Sequence: Synthetic oligonucleotide
tgacggcgattgagccgacgggtggaaacccaaaacgtaatcaacaagtataaactctgggaggttccta

SEQ ID NO: 897 - DNA, 70 bp, Artificial Sequence
  Description of Artificial Sequence: Synthetic oligonucleotide
tgacggcgattgagccgacgggtggaaacccaaaacgtaatcaactcaaatcccttaataaggaggtaaa

SEQ ID NO: 898 - DNA, 106 bp, Artificial Sequence
  Description of Artificial Sequence: Synthetic polynucleotide
ctctagaaataattttgtttaactttaagaaggagatatacatatgaaacaaagcactattgcactggcactcttaccgttactgtttacccctgtgacaaaagcg

SEQ ID NO: 899 - DNA, 63 bp, Artificial Sequence
  Description of Artificial Sequence: Synthetic oligonucleotide
atgaaacaaagcactattgcactggcactcttaccgttactgtttacccctgtgacaaaagcg

SEQ ID NO: 900 - DNA, 109 bp, Artificial Sequence
  Description of Artificial Sequence: Synthetic polynucleotide
ctctagaaataattttgtttaactttaagaaggagatatacatatgatgaagcgcaatattctggcagtgatcgtccctgctctgttagtagcaggtactgcaaacgct

SEQ ID NO: 901 - DNA, 66 bp, Artificial Sequence
  Description of Artificial Sequence: Synthetic oligonucleotide
atgatgaagcgcaatattctggcagtgatcgtccctgctctgttagtagcaggtactgcaaacgct

SEQ ID NO: 902 - DNA, 88 bp, Artificial Sequence
  Description of Artificial Sequence: Synthetic oligonucleotide
ctctagaaataattttgtttaactttaagaaggagatatacatatgagaactctgactctaaatgaattagattctgtttctggtggt

SEQ ID NO: 903 - DNA, 45 bp, Artificial Sequence
  Description of Artificial Sequence: Synthetic oligonucleotide
atgagaactctgactctaaatgaattagattctgtttctggtggt

SEQ ID NO: 904 - DNA, 88 bp, Artificial Sequence
  Description of Artificial Sequence: Synthetic oligonucleotide
gacgccagagagttaagggggttaaatgaaacaatcgaccatcgcattggcgctgcttcctctattgttcacaccggtgacaaaggca

SEQ ID NO: 905 - DNA, 63 bp, Artificial Sequence
  Description of Artificial Sequence: Synthetic oligonucleotide
atgaaacaatcgaccatcgcattggcgctgcttcctctattgttcacaccggtgacaaaggca

SEQ ID NO: 906 - DNA, 160 bp, Artificial Sequence
  Description of Artificial Sequence: Synthetic polynucleotide
ctctagaaataattttgtttaactttaagaaggagatatacatatgaacaataacgatctctttcaggcatcacgtcggcgttttctggcacaactcggcggcttaaccgtcgccgggatgctggggccgtcattgttaacgccgcgacgtgcgactgcg

SEQ ID NO: 907 - DNA, 117 bp, Artificial Sequence
  Description of Artificial Sequence: Synthetic polynucleotide
atgaacaataacgatctctttcaggcatcacgtcggcgttttctggcacaactcggcggcttaaccgtcgccgggatgctggggccgtcattgttaacgccgcgacgtgcgactgcg

SEQ ID NO: 908 - DNA, 148 bp, Artificial Sequence
  Description of Artificial Sequence: Synthetic polynucleotide
cccacattcgaggtactaaatgaacaataacgatctctttcaggcatcacgtcggcgttttctggcacaactcggcggcttaaccgtcgccgggatgctggggacgtcattgttaacgccgcgccgtgcgactgcggcgcaagcggcg

SEQ ID NO: 909 - DNA, 129 bp, Artificial Sequence
  Description of Artificial Sequence: Synthetic polynucleotide
atgaacaataacgatctctttcaggcatcacgtcggcgttttctggcacaactcggcggcttaaccgtcgccgggatgctggggacgtcattgttaacgccgcgccgtgcgactgcggcgcaagcggcg

SEQ ID NO: 910 - DNA, 130 bp, Artificial Sequence
  Description of Artificial Sequence: Synthetic polynucleotide
accctattacacacctaaggaggccaaatacatggacgtcagtcgcagacaattttttaaaatctgcgcgggcggtatggcgggaacaacagtagcagcattgggctttgccccgaagcaagcactggct

SEQ ID NO: 911 - DNA, 99 bp, Artificial Sequence
  Description of Artificial Sequence: Synthetic oligonucleotide
atggacgtcagtcgcagacaattttttaaaatctgcgcgggcggtatggcgggaacaacagtagcagcattgggctttgccccgaagcaagcactggct

SEQ ID NO: 912 - DNA, 168 bp, Artificial Sequence
  Description of Artificial Sequence: Synthetic polynucleotide
tacgcaaaaaacataatttaagagaggataaacatgaaaacgaaaatccctgatgcggtattggctgctgaggtgagtcgccgtggtttggtaaaaacgacagcgatcggcggcctggcaatggccagcagcgcattaacattaccttttagtcggattgcgcacgct

SEQ ID NO: 913 - DNA, 135 bp, Artificial Sequence
  Description of Artificial Sequence: Synthetic polynucleotide
atgaaaacgaaaatccctgatgcggtattggctgctgaggtgagtcgccgtggtttggtaaaaacgacagcgatcggcggcctggcaatggccagcagcgcattaacattaccttttagtcggattgcgcacgct

SEQ ID NO: 914 - DNA, 712 bp, Artificial Sequence
  Description of Artificial Sequence: Synthetic polynucleotide
gaattcgttaagacccactttcacatttaagttgtttttctaatccgcatatgatcaattcaaggccgaataagaaggctggctctgcaccttggtgatcaaataattcgatagcttgtcgtaataatggcggcatactatcagtagtaggtgtttccctttcttctttagcgacttgatgctcttgatcttccaatacgcaacctaaagtaaaatgccccacagcgctgagtgcatataatgcattctctagtgaaaaaccttgttggcataaaaaggctaattgattttcgagagtttcatactgtttttctgtaggccgtgtacctaaatgtacttttgctccatcgcgatgacttagtaaagcacatctaaaacttttagcgttattacgtaaaaaatcttgccagctttccccttctaaagggcaaaagtgagtatggtgcctatctaacatctcaatggctaaggcgtcgagcaaagcccgcttattttttacatgccaatacaatgtaggctgctctacacctagcttctgggcgagtttacgggttgttaaaccttcgattccgacctcattaagcagctctaatgcgctgttaatcactttacttttatctaatctagacatcattaattcctaatttttgttgacactctatcattgatagagttattttaccactccctatcagtgatagagaaaagtgaa

SEQ ID NO: 915 - DNA, 104 bp, Artificial Sequence; identical to SEQ ID NO: 801
  Description of Artificial Sequence: Synthetic polynucleotide

SEQ ID NO: 916 - DNA, 162 bp, Artificial Sequence
  Description of Artificial Sequence: Synthetic polynucleotide
ggtaccagttgttcttattggtggtgttgctttatggttgcatcgtagtaaatggttgtaacaaaagcaatttttccggctgtctgtatacaaaaacgccgcaaagtttgagcgaagtcaataaactctctacccattcagggcaatatctctcttggatcc

SEQ ID NO: 917 - DNA, 358 bp, Artificial Sequence
  Description of Artificial Sequence: Synthetic polynucleotide
cacatttccccgaaaagtgccgatggccccccgatggtagtgtggcccatgcgagagtagggaactgccaggcatcaaataaaacgaaaggctcagtcgaaagactgggcctttcgttttatctgttgtttgtcggtgaacgctctcctgagtaggacaaatccgccgggagcggatttgaacgttgcgaagcaacggcccggagggtggcgggcaggacgcccgccataaactgccaggcatcaaattaagcagaaggccatcctgacggatggcctttttgcgtggccagtgccaagcttgcatgcagattgcagcattacacgtcttgagcgattgtgtaggctggagctgcttc

SEQ ID NO: 918 - DNA, 48 bp, Artificial Sequence
  Description of Artificial Sequence: Synthetic oligonucleotide
gaagttcctatactttctagagaataggaacttcggaataggaacttc

SEQ ID NO: 919 - DNA, 1345 bp, Artificial Sequence
  Description of Artificial Sequence: Synthetic polynucleotide
aagatcccctcacgctgccgcaagcactcagggcgcaagggctgctaaaggaagcggaacacgtagaaagccagtccgcagaaacggtgctgaccccggatgaatgtcagctactgggctatctggacaagggaaaacgcaagcgcaaagagaaagcaggtagcttgcagtgggcttacatggcgatagctagactgggcggttttatggacagcaagcgaaccggaattgccagctggggcgccctctggtaaggttgggaagccctgcaaagtaaactggatggctttcttgccgccaaggatctgatggcgcaggggatcaagatctgatcaagagacaggatgaggatcgtttcgcatgattgaacaagatggattgcacgcaggttctccggccgcttgggtggagaggctattcggctatgactgggcacaacagacaatcggctgctctgatgccgccgtgttccggctgtcagcgcaggggcgcccggttctttttgtcaagaccgacctgtccggtgccctgaatgaactgcaggacgaggcagcgcggctatcgtggctggccacgacgggcgttccttgcgcagctgtgctcgacgttgtcactgaagcgggaagggactggctgctattgggcgaagtgccggggcaggatctcctgtcatctcaccttgctcctgccgagaaagtatccatcatggctgatgcaatgcggcggctgcatacgcttgatccggctacctgcccattcgaccaccaagcgaaacatcgcatcgagcgagcacgtactcggatggaagccggtcttgtcgatcaggatgatctggacgaagagcatcaggggctcgcgccagccgaactgttcgccaggctcaaggcgcgcatgcccgacggcgaggatctcgtcgtgacccatggcgatgcctgcttgccgaatatcatggtggaaaatggccgcttttctggattcatcgactgtggccggctgggtgtggcggaccgctatcaggacatagcgttggctacccgtgatattgctgaagagcttggcggcgaatgggctgaccgcttcctcgtgctttacggtatcgccgctcccgattcgcagcgcatcgccttctatcgccttcttgacgagttcttctgagcgggactctggggttcgaaatgaccgaccaagcgacgcccaacctgccatcacgagatttcgattccaccgccgccttctatgaaaggttgggcttcggaatcgttttccgggacgccggctggatgatcctccagcgcggggatctcatgctggagttcttcgcccaccccagcttcaaaagcgctct

SEQ ID NO: 920 - protein, 219 aa, Artificial Sequence
  Description of Artificial Sequence: Synthetic polypeptide
MMKRNILAVIVPALLVAGTANARNLPVATPDPGMFPCLHHSQNLLRAVSNMLQKARQTLEFYPCTSEEIDHEDITKDKTSTVEACLPLELTKNESCLNSRETSFITNGSCLASRKTSFMMALCLSSIYEDLKMYQVEFKTMNAKLLMDPKRQIFLDQNMLAVIDELMQALNFNSETVPQKSSLEEPDFYKTKIKLCILLHAFRIRAVTIDRVMSYLNAS

SEQ ID NO: 921 - protein, 218 aa, Artificial Sequence
  Description of Artificial Sequence: Synthetic polypeptide
MKQSTIALALLPLLFTPVTKARNLPVATPDPGMFPCLHHSQNLLRAVSNMLQKARQTLEFYPCTSEEIDHEDITKDKTSTVEACLPLELTKNESCLNSRETSFITNGSCLASRKTSFMMALCLSSIYEDLKMYQVEFKTMNAKLLMDPKRQIFLDQNMLAVIDELMQALNFNSETVPQKSSLEEPDFYKTKIKLCILLHAFRIRAVTIDRVMSYLNAS

SEQ ID NO: 922 - protein, 236 aa, Artificial Sequence
  Description of Artificial Sequence: Synthetic polypeptide
MNNNDLFQASRRRFLAQLGGLTVAGMLGPSLLTPRRATARNLPVATPDPGMFPCLHHSQNLLRAVSNMLQKARQTLEFYPCTSEEIDHEDITKDKTSTVEACLPLELTKNESCLNSRETSFITNGSCLASRKTSFMMALCLSSIYEDLKMYQVEFKTMNAKLLMDPKRQIFLDQNMLAVIDELMQALNFNSETVPQKSSLEEPDFYKTKIKLCILLHAFRIRAVTIDRVMSYLNAS

SEQ ID NO: 923 - protein, 328 aa, Artificial Sequence
  Description of Artificial Sequence: Synthetic polypeptide
MMKRNILAVIVPALLVAGTANAIWELKKDVYVVELDWYPDAPGEMVVLTCDTPEEDGITWTLDQSSEVLGSGKTLTIQVKEFGDAGQYTCHKGGEVLSHSLLLLHKKEDGIWSTDILKDQKEPKNKTFLRCEAKNYSGRFTCWWLTTISTDLTFSVKSSRGSSDPQGVTCGAATLSAERVRGDNKEYEYSVECQEDSACPAAEESLPIEVMVDAVHKLKYENYTSSFFIRDIIKPDPPKNLQLKPLKNSRQVEVSWEYPDTWSTPHSYFSLTFCVQVQGKSKREKKDRVFTDKTSATVICRKNASISVRAQDRYYSSSWSEWASVPCS

SEQ ID NO: 924 - protein, 327 aa, Artificial Sequence
  Description of Artificial Sequence: Synthetic polypeptide
MKQSTIALALLPLLFTPVTKAIWELKKDVYVVELDWYPDAPGEMVVLTCDTPEEDGITWTLDQSSEVLGSGKTLTIQVKEFGDAGQYTCHKGGEVLSHSLLLLHKKEDGIWSTDILKDQKEPKNKTFLRCEAKNYSGRFTCWWLTTISTDLTFSVKSSRGSSDPQGVTCGAATLSAERVRGDNKEYEYSVECQEDSACPAAEESLPIEVMVDAVHKLKYENYTSSFFIRDIIKPDPPKNLQLKPLKNSRQVEVSWEYPDTWSTPHSYFSLTFCVQVQGKSKREKKDRVFTDKTSATVICRKNASISVRAQDRYYSSSWSEWASVPCS

SEQ ID NO: 925 - protein, 345 aa, Artificial Sequence
  Description of Artificial Sequence: Synthetic polypeptide
MNNNDLFQASRRRFLAQLGGLTVAGMLGPSLLTPRRATAIWELKKDVYVVELDWYPDAPGEMVVLTCDTPEEDGITWTLDQSSEVLGSGKTLTIQVKEFGDAGQYTCHKGGEVLSHSLLLLHKKEDGIWSTDILKDQKEPKNKTFLRCEAKNYSGRFTCWWLTTISTDLTFSVKSSRGSSDPQGVTCGAATLSAERVRGDNKEYEYSVECQEDSACPAAEESLPIEVMVDAVHKLKYENYTSSFFIRDIIKPDPPKNLQLKPLKNSRQVEVSWEYPDTWSTPHSYFSLTFCVQVQGKSKREKKDRVFTDKTSATVICRKNASISVRAQDRYYSSSWSEWASVPCS

SEQ ID NO: 926 - protein, 219 aa, Artificial Sequence; identical to SEQ ID NO: 920
  Description of Artificial Sequence: Synthetic polypeptide

SEQ ID NO: 927 - protein, 218 aa, Artificial Sequence; identical to SEQ ID NO: 921
  Description of Artificial Sequence: Synthetic polypeptide

SEQ ID NO: 928 - protein, 236 aa, Artificial Sequence; identical to SEQ ID NO: 922
  Description of Artificial Sequence: Synthetic polypeptide

SEQ ID NO: 929 - protein, 335 aa, Artificial Sequence
  Description of Artificial Sequence: Synthetic polypeptide
MMKRNILAVIVPALLVAGTANAMWELEKDVYVVEVDWTPDAPGETVNLTCDTPEEDDITWTSDQRHGVIGSGKTLTITVKEFLDAGQYTCHKGGETLSHSHLLLHKKENGIWSTEILKNFKNKTFLKCEAPNYSGRFTCSWLVQRNMDLKFNIKSSSSSPDSRAVTCGMASLSAEKVTLDQRDYEKYSVSCQEDVTCPTAEETLPIELALEARQQNKYENYSTSFFIRDIIKPDPPKNLQMKPLKNSQVEVSWEYPDSWSTPHSYFSLKFFVRIQRKKEKMKETEEGCNQKGAFLVEKTSTEVQCKGGNVCVQAQDRYYNSSCSKWACVPCRVRS

SEQ ID NO: 930 - protein, 334 aa, Artificial Sequence
  Description of Artificial Sequence: Synthetic polypeptide
MKQSTIALALLPLLFTPVTKAMWELEKDVYVVEVDWTPDAPGETVNLTCDTPEEDDITWTSDQRHGVIGSGKTLTITVKEFLDAGQYTCHKGGETLSHSHLLLHKKENGIWSTEILKNFKNKTFLKCEAPNYSGRFTCSWLVQRNMDLKFNIKSSSSSPDSRAVTCGMASLSAEKVTLDQRDYEKYSVSCQEDVTCPTAEETLPIELALEARQQNKYENYSTSFFIRDIIKPDPPKNLQMKPLKNSQVEVSWEYPDSWSTPHSYFSLKFFVRIQRKKEKMKETEEGCNQKGAFLVEKTSTEVQCKGGNVCVQAQDRYYNSSCSKWACVPCRVRS

SEQ ID NO: 931 - protein, 352 aa, Artificial Sequence
  Description of Artificial Sequence: Synthetic polypeptide
MNNNDLFQASRRRFLAQLGGLTVAGMLGPSLLTPRRATAMWELEKDVYVVEVDWTPDAPGETVNLTCDTPEEDDITWTSDQRHGVIGSGKTLTITVKEFLDAGQYTCHKGGETLSHSHLLLHKKENGIWSTEILKNFKNKTFLKCEAPNYSGRFTCSWLVQRNMDLKFNIKSSSSSPDSRAVTCGMASLSAEKVTLDQRDYEKYSVSCQEDVTCPTAEETLPIELALEARQQNKYENYSTSFFIRDIIKPDPPKNLQMKPLKNSQVEVSWEYPDSWSTPHSYFSLKFFVRIQRKKEKMKETEEGCNQKGAFLVEKTSTEVQCKGGNVCVQAQDRYYNSSCSKWACVPCRVRS

SEQ ID NO: 932 - protein, 149 aa, Artificial Sequence
  Description of Artificial Sequence: Synthetic polypeptide
MMKRNILAVIVPALLVAGTANAAPARSPSPSTQPWEHVNAIQEARRLLNLSRDTAAEMNETVEVISEMFDLQEPTCLQTRLELYKQGLRGSLTKLKGPLTMMASHYKQHCPPTPETSCATQIITFESFKENLKDFLLVIPFDCWEPVQE

SEQ ID NO: 933 - protein, 148 aa, Artificial Sequence
  Description of Artificial Sequence: Synthetic polypeptide
MKQSTIALALLPLLFTPVTKAAPARSPSPSTQPWEHVNAIQEARRLLNLSRDTAAEMNETVEVISEMFDLQEPTCLQTRLELYKQGLRGSLTKLKGPLTMMASHYKQHCPPTPETSCATQIITFESFKENLKDFLLVIPFDCWEPVQE

SEQ ID NO: 934 - protein, 166 aa, Artificial Sequence
  Description of Artificial Sequence: Synthetic polypeptide
MNNNDLFQASRRRFLAQLGGLTVAGMLGPSLLTPRRATAAPARSPSPSTQPWEHVNAIQEARRLLNLSRDTAAEMNETVEVISEMFDLQEPTCLQTRLELYKQGLRGSLTKLKGPLTMMASHYKQHCPPTPETSCATQIITFESFKENLKDFLLVIPFDCWEPVQE

SEQ ID NO: 935 - protein, 136 aa, Artificial Sequence
  Description of Artificial Sequence: Synthetic polypeptide
MMKRNILAVIVPALLVAGTANANWVNVISDLKKIEDLIQSMHIDATLYTESDVHPSCKVTAMKCFLLELQVISLESGDASIHDTVENLIILANNSLSSNGNVTESGCKECEELEEKNIKEFLQSFVHIVQMFINTS

SEQ ID NO: 936 - protein, 135 aa, Artificial Sequence
  Description of Artificial Sequence: Synthetic polypeptide
MKQSTIALALLPLLFTPVTKANWVNVISDLKKIEDLIQSMHIDATLYTESDVHPSCKVTAMKCFLLELQVISLESGDASIHDTVENLIILANNSLSSNGNVTESGCKECEELEEKNIKEFLQSFVHIVQMFINTS

SEQ ID NO: 937 - protein, 153 aa, Artificial Sequence
  Description of Artificial Sequence: Synthetic polypeptide
MNNNDLFQASRRRFLAQLGGLTVAGMLGPSLLTPRRATANWVNVISDLKKIEDLIQSMHIDATLYTESDVHPSCKVTAMKCFLLELQVISLESGDASIHDTVENLIILANNSLSSNGNVTESGCKECEELEEKNIKEFLQSFVHIVQMFINTS

SEQ ID NO: 938 - protein, 199 aa, Artificial Sequence
  Description of Artificial Sequence: Synthetic polypeptide
MMKRNILAVIVPALLVAGTANAGPQREEFPRDLSLISPLAQAVRSSSRTPSDKPVAHVVANPQAEGQLQWLNRRANALLANGVELRDNQLVVPSEGLYLIYSQVLFKGQGCPSTHVLLTHTISRIAVSYQTKVNLLSAIKSPCQRETPEGAEAKPWYEPIYLGGVFQLEKGDRLSAEINRPDYLDFAESGQVYFGIIAL

SEQ ID NO: 939 - protein, 198 aa, Artificial Sequence
  Description of Artificial Sequence: Synthetic polypeptide
MKQSTIALALLPLLFTPVTKAGPQREEFPRDLSLISPLAQAVRSSSRTPSDKPVAHVVANPQAEGQLQWLNRRANALLANGVELRDNQLVVPSEGLYLIYSQVLFKGQGCPSTHVLLTHTISRIAVSYQTKVNLLSAIKSPCQRETPEGAEAKPWYEPIYLGGVFQLEKGDRLSAEINRPDYLDFAESGQVYFGIIAL

SEQ ID NO: 940 - protein, 216 aa, Artificial Sequence
  Description of Artificial Sequence: Synthetic polypeptide
MNNNDLFQASRRRFLAQLGGLTVAGMLGPSLLTPRRATAGPQREEFPRDLSLISPLAQAVRSSSRTPSDKPVAHVVANPQAEGQLQWLNRRANALLANGVELRDNQLVVPSEGLYLIYSQVLFKGQGCPSTHVLLTHTISRIAVSYQTKVNLLSAIKSPCQRETPEGAEAKPWYEPIYLGGVFQLEKGDRLSAEINRPDYLDFAESGQVYFGIIAL

SEQ ID NO: 941 - protein, 160 aa, Artificial Sequence
  Description of Artificial Sequence: Synthetic polypeptide
MMKRNILAVIVPALLVAGTANAQDPYVKEAENLKKYFNAGHSDVADNGTLFLGILKNWKEESDRKIMQSQIVSFYFKLFKNFKDDQSIQKSVETIKEDMNVKFFNSNKKKRDDFEKLTNYSVTDLNVQRKAIHELIQVMAELSPAAKTGKRKRSQMLFRG

SEQ ID NO: 942 - protein, 159 aa, Artificial Sequence
  Description of Artificial Sequence: Synthetic polypeptide
MKQSTIALALLPLLFTPVTKAQDPYVKEAENLKKYFNAGHSDVADNGTLFLGILKNWKEESDRKIMQSQIVSFYFKLFKNFKDDQSIQKSVETIKEDMNVKFFNSNKKKRDDFEKLTNYSVTDLNVQRKAIHELIQVMAELSPAAKTGKRKRSQMLFRG

SEQ ID NO: 943 - protein, 177 aa, Artificial Sequence
  Description of Artificial Sequence: Synthetic polypeptide
MNNNDLFQASRRRFLAQLGGLTVAGMLGPSLLTPRRATAQDPYVKEAENLKKYFNAGHSDVADNGTLFLGILKNWKEESDRKIMQSQIVSFYFKLFKNFKDDQSIQKSVETIKEDMNVKFFNSNKKKRDDFEKLTNYSVTDLNVQRKAIHELIQVMAELSPAAKTGKRKRSQMLFRG

SEQ ID NO: 944-952 - skipped (9 entries)

SEQ ID NO: 953 - DNA, 657 bp, Artificial Sequence
  Description of Artificial Sequence: Synthetic polynucleotide
atgaaacagagcacaattgctctggccttgttgccattactgtttacccctgttactaaggctaggaacctgcctgtggcaacaccagaccctgggatgttcccttgcttacatcattcccagaacctgttgcgtgcggtgtctaacatgctgcagaaagccaggcagacgctggaattctacccatgcacttccgaagagatagatcatgaagacattacgaaagacaaaacctcaacggttgaagcatgcttacctctggaattgactaagaatgaatcgtgcttaaactcaagagagaccagtttcatcactaatggctcttgcttagcgtcgcgcaagaccagcttcatgatggcgctctgcctaagtagcatctacgaggacctcaaaatgtaccaagttgaatttaaaactatgaatgccaaacttctaatggacccaaaaagacagatatttttagatcagaatatgcttgcggttattgacgaactcatgcaggcattgaattttaattccgagacggtgccacaaaaaagttctttggaggagccggacttttacaagacaaaaatcaagctgtgcatacttcttcacgcattcagaatacgggccgttacgatcgatcgcgtcatgtcgtatcttaatgcgagctga

SEQ ID NO: 954 - DNA, 987 bp, Artificial Sequence
  Description of Artificial Sequence: Synthetic polynucleotide
atgaagcagagcacgatcgcattggcgttgctaccgctgttgtttaccccggtcacaaaagccatctgggaactgaaaaaagatgtttatgtagttgaactggattggtacccggatgcacccggtgagatggtggttttgacctgcgacacgccggaagaagatggcataacgtggaccctggatcaaagctctgaagttctgggttcaggtaagacattgacgatccaagtaaaagaatttggcgacgcaggtcagtacacctgccacaaaggtggcgaagttctgtcgcactcactcctgctcctgcacaaaaaagaggatggcatctggagtactgatatcctaaaggatcaaaaagaacctaaaaacaaaacgttcttgcgctgtgaagcgaagaactatagtggtcgctttacgtgctggtggttgactaccatttccaccgatttgaccttttctgttaagagttcgcgcggctcgtcagatccgcagggcgttacttgcggtgcggcgacgctgtcagctgagagagttcgtggggacaacaaagagtacgaatatagtgtagaatgtcaagaggattcggcgtgcccggcagcagaggagtctctccccattgaagttatggtggacgcagtgcataaactgaaatatgagaattacacatcaagcttttttattcgcgatatcatcaaaccggatcctccaaaaaatctgcaactaaagcccctgaaaaattcgcgccaagttgaggtgagctgggaatatccggatacttggtcgacaccgcattcttatttctcactgaccttctgcgttcaggttcaaggtaaatcaaaacgagaaaaaaaggatcgcgtctttaccgacaaaacgtctgctactgtaatctgccgcaagaatgcgtcaatttctgtacgtgcgcaagatcgctactactctagtagttggtctgaatgggcttcagtgccatgctcctgatga

SEQ ID NO: 955 - DNA, 657 bp, Artificial Sequence
  Description of Artificial Sequence: Synthetic polynucleotide
atgaaacagagtacgatagccctagccctgttgccgctcctgttcacccccgttactaaagcacgtaaccttccggtggccacgccagatccgggcatgttcccgtgcttacaccattcccagaatctgctgcgcgctgtgagtaatatgctgcagaaggcgagacaaactttggaattttacccgtgcacttcggaggagattgaccatgaggatatcacaaaagacaaaaccagtacagtggaagcctgcctgccccttgaactgactaaaaatgagagttgtttaaattcacgcgaaaccagcttcattactaacggaagctgcttagcatcgcggaaaaccagttttatgatggccctttgcctttcatctatttacgaggaccttaaaatgtatcaagttgaatttaagactatgaacgcgaaactgctaatggatcccaagcgacaaatctttcttgatcaaaatatgttggctgttattgatgaactgatgcaagccctgaattttaactcagaaaccgtacctcagaaatcgagtttagaagaacccgatttctacaaaactaaaatcaagttgtgtatccttttacatgccttccggattcgggccgtcactattgatcgcgtgatgtcgtacttgaatgcctcctaa

SEQ ID NO: 956 - DNA, 1005 bp, Artificial Sequence
  Description of Artificial Sequence: Synthetic polynucleotide
atgaaacagagcacgatcgcacttgcccttttgccgctgttatttaccccagtgacgaaagccatgtgggaattggaaaaagacgtgtatgttgttgaagttgactggactccggacgcgcctggtgaaactgttaatctgacttgtgatacaccggaggaagatgatataacttggactagcgatcaacgacacggcgtaatcggctctggtaagactttgaccattactgtgaaggaattcttggatgcggggcaatatacgtgtcataaaggcggcgagacgctgtcacactctcacctgttgttacataaaaaagagaatggtatatggtctacggagatcttgaaaaactttaaaaacaaaacttttttgaagtgtgaggctccaaactattctggtcgctttacctgtagttggttggtgcaacgtaacatggatctcaaatttaacataaagtcgtcttcgtcttctcccgatagccgagcggttacctgtggcatggctagtttgtcggcggagaaggtgaccttggatcaacgtgattatgaaaaatatagcgtttcgtgccaagaggacgttacgtgccctaccgctgaagagactttgccgattgaattggcactggaagcacgacaacaaaataaatacgagaattactcaactagtttcttcatccgagatatcataaaaccggaccccccgaagaatctgcaaatgaaaccgcttaaaaattcacaggtagaggtttcgtgggagtacccggatagttggtctacgcctcattcgtattttagcctgaaatttttcgttcgaatacagcgaaaaaaagagaagatgaaagaaactgaagaagggtgtaaccaaaaaggtgcatttctggtggagaaaactagcaccgaggttcaatgcaaaggcggtaacgtgtgcgtacaagctcaagaccgttattataacagtagctgttctaaatgggcttgcgtgccctgccgcgtgagatcatga

SEQ ID NO: 957 - DNA, 408 bp, Artificial Sequence
  Description of Artificial Sequence: Synthetic polynucleotide
atgaagcaatctacgatcgcactagcgttactgccgttattgtttactcctgtgactaaggctaattgggttaatgttatatctgatttgaaaaaaatagaggatctgattcaatcaatgcacatagatgcgactctgtatactgagagcgatgtgcacccgagttgcaaagttactgctatgaaatgttttctgctggagctgcaagttatctctctggagagtggtgatgcgtctattcacgatactgttgagaatctgattattctggctaataactcgctgtcaagtaatgggaatgttacggaatctggctgtaaggagtgtgaagaattagaagaaaaaaatattaaagagtttctgcagagttttgtgcacattgttcagatgtttatcaatactagctga

SEQ ID NO: 958 - DNA, 447 bp, Artificial Sequence
  Description of Artificial Sequence: Synthetic polynucleotide
atgaagcaatctacgatcgcgttggccttactgcccctgttattcacacccgtgaccaaagcggcaccggcccgcagcccatcaccgtcaactcaaccttgggaacatgtaaatgctattcaagaagctcgccgcctgttgaatttgagtcgcgatactgcagcagagatgaatgagactgtagaggtgatttcagaaatgtttgacctgcaggagccgacttgtttgcaaactcgcctggagctgtacaaacaaggcctgcgtggctcgctgactaaactgaaaggtcctctgacgatgatggcttctcattataaacaacactgcccgcctactccggagacgtcttgcgcgacccagataattacttttgaatcttttaaagagaatctgaaagactttctgctggttatcccgtttgattgttgggaaccggttcaagaataa

SEQ ID NO: 959 - DNA, 597 bp, Artificial Sequence
  Description of Artificial Sequence: Synthetic polynucleotide
atgaaacaatcaacgatcgctctggctctgcttccgctgctctttactccagttactaaagcgggtccgcagagggaagaattcccgcgcgatttgagcctgatttcacctcttgctcaggctgtccgctcctcttcgcgtaccccctcggataaacctgtcgcgcacgtggttgcgaacccgcaagcggaagggcagctgcaatggttaaaccgccgggctaatgcactgctggctaatggagttgagttacgcgacaaccaacttgtcgttccttcggaagggctgtatctgatctattcacaggttctctttaaagggcagggttgcccatcaacccacgtgctcctgacacacacgatcagtcgtatcgcggtatcctatcagacgaaagttaacctcctgtcagcgattaaatcgccgtgtcagagagaaactccagagggtgcggaagctaaaccgtggtatgaacctatttatcttggtggagttttccagttggaaaaaggtgatagactgtcggcagagatcaatcgccctgattacctggatttcgctgagtcgggtcaggtttatttcggaattattgcactgtga

SEQ ID NO: 960 - DNA, 480 bp, Artificial Sequence
  Description of Artificial Sequence: Synthetic polynucleotide
atgaagcaatctacgatagcactggcgttgctgccgctgctgttcaccccggttaccaaggcgcaggatccttacgttaaagaagcagagaatctgaaaaaatactttaatgcaggccacagcgatgtggcagataatggcacgttattcctgggcattctgaaaaattggaaagaagaatctgaccggaagatcatgcaatctcagatcgtatcattttatttcaagttgtttaaaaacttcaaggatgaccagtcgattcaaaaatcagtggaaacgatcaaagaagatatgaacgttaagttcttcaactcaaataaaaaaaaacgcgatgatttcgaaaaactgactaattattcggtaactgatttgaatgttcagcgcaaggcgattcatgaattgattcaggttatggcagaactgtcgccagcggcaaaaacgggtaaacgaaaacgttctcagatgttgtttcgtggttga

SEQ ID NO: 961-964 - skipped (4 entries)

SEQ ID NO: 965 - DNA, 2531 bp, Artificial Sequence
  Description of Artificial Sequence: Synthetic polynucleotide
ccaggatacatagattaccacaactccgagcccttccaccttaagacccactttcacatttaagttgtttttctaatccgcatatgatcaattcaaggccgaataagaaggctggctctgcaccttggtgatcaaataattcgatagcttgtcgtaataatggcggcatactatcagtagtaggtgtttccctttcttctttagcgacttgatgctcttgatcttccaatacgcaacctaaagtaaaatgccccacagcgctgagtgcatataatgcattctctagtgaaaaaccttgttggcataaaaaggctaattgattttcgagagtttcatactgtttttctgtaggccgtgtacctaaatgtacttttgctccatcgcgatgacttagtaaagcacatctaaaacttttagcgttattacgtaaaaaatcttgccagctttccccttctaaagggcaaaagtgagtatggtgcctatctaacatctcaatggctaaggcgtcgagcaaagcccgcttattttttacatgccaatacaatgtaggctgctctacacctagcttctgggcgagtttacgggttgttaaaccttcgattccgacctcattaagcagctctaatgcgctgttaatcactttacttttatctaatctagacatcattaattcctaatttttgttgacactctatcattgatagagttattttaccactccctatcagtgatagagaaaagtgaaataagtcataaatagggagtccaaaatgaagcagagcacgatcgcattggcgttgctaccgctgttgtttaccccggtcacaaaagccatctgggaactgaaaaaagatgtttatgtagttgaactggattggtacccggatgcacccggtgagatggtggttttgacctgcgacacgccggaagaagatggcataacgtggaccctggatcaaagctctgaagttctgggttcaggtaagacattgacgatccaagtaaaagaatttggcgacgcaggtcagtacacctgccacaaaggtggcgaagttctgtcgcactcactcctgctcctgcacaaaaaagaggatggcatctggagtactgatatcctaaaggatcaaaaagaacctaaaaacaaaacgttcttgcgctgtgaagcgaagaactatagtggtcgctttacgtgctggtggttgactaccatttccaccgatttgaccttttctgttaagagttcgcgcggctcgtcagatccgcagggcgttacttgcggtgcggcgacgctgtcagctgagagagttcgtggggacaacaaagagtacgaatatagtgtagaatgtcaagaggattcggcgtgcccggcagcagaggagtctctccccattgaagttatggtggacgcagtgcataaactgaaatatgagaattacacatcaagcttttttattcgcgatatcatcaaaccggatcctccaaaaaatctgcaactaaagcccctgaaaaattcgcgccaagttgaggtgagctgggaatatccggatacttggtcgacaccgcattcttatttctcactgaccttctgcgttcaggttcaaggtaaatcaaaacgagaaaaaaaggatcgcgtctttaccgacaaaacgtctgctactgtaatctgccgcaagaatgcgtcaatttctgtacgtgcgcaagatcgctactactctagtagttggtctgaatgggcttcagtgccatgctcctgatgagaaaccctacggaggaggttaatttatgaaacagagcacaattgctctggccttgttgccattactgtttacccctgttactaaggctaggaacctgcctgtggcaacaccagaccctgggatgttcccttgcttacatcattcccagaacctgttgcgtgcggtgtctaacatgctgcagaaagccaggcagacgctggaattctacccatgcacttccgaagagatagatcatgaagacattacgaaagacaaaacctcaacggttgaagcatgcttacctctggaattgactaagaatgaatcgtgcttaaactcaagagagaccagtttcatcactaatggctcttgcttagcgtcgcgcaagaccagcttcatgatggcgctctgcctaagtagcatctacgaggacctcaaaatgtaccaagttgaatttaaaactatgaatgccaaacttctaatggacccaaaaagacagatatttttagatcagaatatgcttgcggttattgacgaactcatgcaggcattgaattttaattccgagacggtgccacaaaaaagttctttggaggagccggacttttacaagacaaaaatcaagctgtgcatacttcttcacgcattcagaatacgggccgttacgatcgatcgcgtcatgtcgtatcttaatgcgagctgaaaataaaacgaaaggctcagtcgaaagactgggcctttcgttttatctgttggttccttatcatctggcgaatcggacccacaagagcactg

SEQ ID NO: 966 - DNA, 2549 bp, Artificial Sequence
  Description of Artificial Sequence: Synthetic polynucleotide
ccaggatacatagattaccacaactccgagcccttccaccttaagacccactttcacatttaagttgtttttctaatccgcatatgatcaattcaaggccgaataagaaggctggctctgcaccttggtgatcaaataattcgatagcttgtcgtaataatggcggcatactatcagtagtaggtgtttccctttcttctttagcgacttgatgctcttgatcttccaatacgcaacctaaagtaaaatgccccacagcgctgagtgcatataatgcattctctagtgaaaaaccttgttggcataaaaaggctaattgattttcgagagtttcatactgtttttctgtaggccgtgtacctaaatgtacttttgctccatcgcgatgacttagtaaagcacatctaaaacttttagcgttattacgtaaaaaatcttgccagctttccccttctaaagggcaaaagtgagtatggtgcctatctaacatctcaatggctaaggcgtcgagcaaagcccgcttattttttacatgccaatacaatgtaggctgctctacacctagcttctgggcgagtttacgggttgttaaaccttcgattccgacctcattaagcagctctaatgcgctgttaatcactttacttttatctaatctagacatcattaattcctaatttttgttgacactctatcattgatagagttattttaccactccctatcagtgatagagaaaagtgaatgttacacatctaaggagaaacattatgaaacagagcacgatcgcacttgcccttttgccgctgttatttaccccagtgacgaaagccatgtgggaattggaaaaagacgtgtatgttgttgaagttgactggactccggacgcgcctggtgaaactgttaatctgacttgtgatacaccggaggaagatgatataacttggactagcgatcaacgacacggcgtaatcggctctggtaagactttgaccattactgtgaaggaattcttggatgcggggcaatatacgtgtcataaaggcggcgagacgctgtcacactctcacctgttgttacataaaaaagagaatggtatatggtctacggagatcttgaaaaactttaaaaacaaaacttttttgaagtgtgaggctccaaactattctggtcgctttacctgtagttggttggtgcaacgtaacatggatctcaaatttaacataaagtcgtcttcgtcttctcccgatagccgagcggttacctgtggcatggctagtttgtcggcggagaaggtgaccttggatcaacgtgattatgaaaaatatagcgtttcgtgccaagaggacgttacgtgccctaccgctgaagagactttgccgattgaattggcactggaagcacgacaacaaaataaatacgagaattactcaactagtttcttcatccgagatatcataaaaccggaccccccgaagaatctgcaaatgaaaccgcttaaaaattcacaggtagaggtttcgtgggagtacccggatagttggtctacgcctcattcgtattttagcctgaaatttttcgttcgaatacagcgaaaaaaagagaagatgaaagaaactgaagaagggtgtaaccaaaaaggtgcatttctggtggagaaaactagcaccgaggttcaatgcaaaggcggtaacgtgtgcgtacaagctcaagaccgttattataacagtagctgttctaaatgggcttgcgtgccctgccgcgtgagatcatgagaagaagattattgaagaggtccgcatgaaacagagtacgatagccctagccctgttgccgctcctgttcacccccgttactaaagcacgtaaccttccggtggccacgccagatccgggcatgttcccgtgcttacaccattcccagaatctgctgcgcgctgtgagtaatatgctgcagaaggcgagacaaactttggaattttacccgtgcacttcggaggagattgaccatgaggatatcacaaaagacaaaaccagtacagtggaagcctgcctgccccttgaactgactaaaaatgagagttgtttaaattcacgcgaaaccagcttcattactaacggaagctgcttagcatcgcggaaaaccagttttatgatggccctttgcctttcatctatttacgaggaccttaaaatgtatcaagttgaatttaagactatgaacgcgaaactgctaatggatcccaagcgacaaatctttcttgatcaaaatatgttggctgttattgatgaactgatgcaagccctgaattttaactcagaaaccgtacctcagaaatcgagtttagaagaacccgatttctacaaaactaaaatcaagttgtgtatccttttacatgccttccggattcgggccgtcactattgatcgcgtgatgtcgtacttgaatgcctcctaaaaataaaacgaaaggctcagtcgaaagactgggcctttcgttttatctgttggttccttatcatctggcgaatcggacccacaagagcactg

SEQ ID NO: 967 - DNA, 1270 bp, Artificial Sequence
  Description of Artificial Sequence: Synthetic polynucleotide
ccaggatacatagattaccacaactccgagcccttccaccttaagacccactttcacatttaagttgtttttctaatccgcatatgatcaattcaaggccgaataagaaggctggctctgcaccttggtgatcaaataattcgatagcttgtcgtaataatggcggcatactatcagtagtaggtgtttccctttcttctttagcgacttgatgctcttgatcttccaatacgcaacctaaagtaaaatgccccacagcgctgagtgcatataatgcattctctagtgaaaaaccttgttggcataaaaaggctaattgattttcgagagtttcatactgtttttctgtaggccgtgtacctaaatgtacttttgctccatcgcgatgacttagtaaagcacatctaaaacttttagcgttattacgtaaaaaatcttgccagctttccccttctaaagggcaaaagtgagtatggtgcctatctaacatctcaatggctaaggcgtcgagcaaagcccgcttattttttacatgccaatacaatgtaggctgctctacacctagcttctgggcgagtttacgggttgttaaaccttcgattccgacctcattaagcagctctaatgcgctgttaatcactttacttttatctaatctagacatcattaattcctaatttttgttgacactctatcattgatagagttattttaccactccctatcagtgatagagaaaagtgaagatcaactcaagataaggaggatccatgaagcaatctacgatcgcactagcgttactgccgttattgtttactcctgtgactaaggctaattgggttaatgttatatctgatttgaaaaaaatagaggatctgattcaatcaatgcacatagatgcgactctgtatactgagagcgatgtgcacccgagttgcaaagttactgctatgaaatgttttctgctggagctgcaagttatctctctggagagtggtgatgcgtctattcacgatactgttgagaatctgattattctggctaataactcgctgtcaagtaatgggaatgttacggaatctggctgtaaggagtgtgaagaattagaagaaaaaaatattaaagagtttctgcagagttttgtgcacattgttcagatgtttatcaatactagctgaaaataaaacgaaaggctcagtcgaaagactgggcctttcgttttatctgttggttccttatcatctggcgaatcggacccacaagagcactg

SEQ ID NO: 968 - DNA, 1309 bp, Artificial Sequence
  Description of Artificial Sequence: Synthetic polynucleotide
ccaggatacatagattaccacaactccgagcccttccaccttaagacccactttcacatttaagttgtttttctaatccgcatatgatcaattcaaggccgaataagaaggctggctctgcaccttggtgatcaaataattcgatagcttgtcgtaataatggcggcatactatcagtagtaggtgtttccctttcttctttagcgacttgatgctcttgatcttccaatacgcaacctaaagtaaaatgccccacagcgctgagtgcatataatgcattctctagtgaaaaaccttgttggcataaaaaggctaattgattttcgagagtttcatactgtttttctgtaggccgtgtacctaaatgtacttttgctccatcgcgatgacttagtaaagcacatctaaaacttttagcgttattacgtaaaaaatcttgccagctttccccttctaaagggcaaaagtgagtatggtgcctatctaacatctcaatggctaaggcgtcgagcaaagcccgcttattttttacatgccaatacaatgtaggctgctctacacctagcttctgggcgagtttacgggttgttaaaccttcgattccgacctcattaagcagctctaatgcgctgttaatcactttacttttatctaatctagacatcattaattcctaatttttgttgacactctatcattgatagagttattttaccactccctatcagtgatagagaaaagtgaagaaagcaacaacatagggggaaagaatgaagcaatctacgatcgcgttggccttactgcccctgttattcacacccgtgaccaaagcggcaccggcccgcagcccatcaccgtcaactcaaccttgggaacatgtaaatgctattcaagaagctcgccgcctgttgaatttgagtcgcgatactgcagcagagatgaatgagactgtagaggtgatttcagaaatgtttgacctgcaggagccgacttgtttgcaaactcgcctggagctgtacaaacaaggcctgcgtggctcgctgactaaactgaaaggtcctctgacgatgatggcttctcattataaacaacactgcccgcctactccggagacgtcttgcgcgacccagataattacttttgaatcttttaaagagaatctgaaagactttctgctggttatcccgtttgattgttgggaaccggttcaagaataaaaataaaacgaaaggctcagtcgaaagactgggcctttcgttttatctgttggttccttatcatctggcgaatcggacccacaagagcactg

SEQ ID NO: 969 - DNA, 1459 bp, Artificial Sequence
  Description of Artificial Sequence: Synthetic polynucleotide
ccaggatacatagattaccacaactccgagcccttccaccttaagacccactttcacatttaagttgtttttctaatccgcatatgatcaattcaaggccgaataagaaggctggctctgcaccttggtgatcaaataattcgatagcttgtcgtaataatggcggcatactatcagtagtaggtgtttccctttcttctttagcgacttgatgctcttgatcttccaatacgcaacctaaagtaaaatgccccacagcgctgagtgcatataatgcattctctagtgaaaaaccttgttggcataaaaaggctaattgattttcgagagtttcatactgtttttctgtaggccgtgtacctaaatgtacttttgctccatcgcgatgacttagtaaagcacatctaaaacttttagcgttattacgtaaaaaatcttgccagctttccccttctaaagggcaaaagtgagtatggtgcctatctaacatctcaatggctaaggcgtcgagcaaagcccgcttattttttacatgccaatacaatgtaggctgctctacacctagcttctgggcgagtttacgggttgttaaaccttcgattccgacctcattaagcagctctaatgcgctgttaatcactttacttttatctaatctagacatcattaattcctaatttttgttgacactctatcattgatagagttattttaccactccctatcagtgatagagaaaagtgaacacaacacagaaaggagggctgtccatgaaacaatcaacgatcgctctggctctgcttccgctgctctttactccagttactaaagcgggtccgcagagggaagaattcccgcgcgatttgagcctgatttcacctcttgctcaggctgtccgctcctcttcgcgtaccccctcggataaacctgtcgcgcacgtggttgcgaacccgcaagcggaagggcagctgcaatggttaaaccgccgggctaatgcactgctggctaatggagttgagttacgcgacaaccaacttgtcgttccttcggaagggctgtatctgatctattcacaggttctctttaaagggcagggttgcccatcaacccacgtgctcctgacacacacgatcagtcgtatcgcggtatcctatcagacgaaagttaacctcctgtcagcgattaaatcgccgtgtcagagagaaactccagagggtgcggaagctaaaccgtggtatgaacctatttatcttggtggagttttccagttggaaaaaggtgatagactgtcggcagagatcaatcgccctgattacctggatttcgctgagtcgggtcaggtttatttcggaattattgcactgtgaaaataaaacgaaaggctcagtcgaaagactgggcctttcgttttatctgttggttccttatcatctggcgaatcggacccacaagagcactg

SEQ ID NO: 970 - DNA, 1342 bp, Artificial Sequence
  Description of Artificial Sequence: Synthetic polynucleotide
ccaggatacatagattaccacaactccgagcccttccaccttaagacccactttcacatttaagttgtttttctaatccgcatatgatcaattcaaggccgaataagaaggctggctctgcaccttggtgatcaaataattcgatagcttgtcgtaataatggcggcatactatcagtagtaggtgtttccctttcttctttagcgacttgatgctcttgatcttccaatacgcaacctaaagtaaaatgccccacagcgctgagtgcatataatgcattctctagtgaaaaaccttgttggcataaaaaggctaattgattttcgagagtttcatactgtttttctgtaggccgtgtacctaaatgtacttttgctccatcgcgatgacttagtaaagcacatctaaaacttttagcgttattacgtaaaaaatcttgccagctttccccttctaaagggcaaaagtgagtatggtgcctatctaacatctcaatggctaaggcgtcgagcaaagcccgcttattttttacatgccaatacaatgtaggctgctctacacctagcttctgggcgagtttacgggttgttaaaccttcgattccgacctcattaagcagctctaatgcgctgttaatcactttacttttatctaatctagacatcattaattcctaatttttgttgacactctatcattgatagagttattttaccactccctatcagtgatagagaaaagtgaacaccaccaccacgaggaggtaaaaaatgaagcaatctacgatagcactggcgttgctgccgctgctgttcaccccggttaccaaggcgcaggatccttacgttaaagaagcagagaatctgaaaaaatactttaatgcaggccacagcgatgtggcagataatggcacgttattcctgggcattctgaaaaattggaaagaagaatctgaccggaagatcatgcaatctcagatcgtatcattttatttcaagttgtttaaaaacttcaaggatgaccagtcgattcaaaaatcagtggaaacgatcaaagaagatatgaacgttaagttcttcaactcaaataaaaaaaaacgcgatgatttcgaaaaactgactaattattcggtaactgatttgaatgttcagcgcaaggcgattcatgaattgattcaggttatggcagaactgtcgccagcggcaaaaacgggtaaacgaaaacgttctcagatgttgtttcgtggttgaaaataaaacgaaaggctcagtcgaaagactgggcctttcgttttatctgttggttccttatcatctggcgaatcggacccacaagagcactg

SEQ ID NO: 971-974 - skipped (4 entries)

SEQ ID NO: 975 - DNA, 5100 bp, Artificial Sequence
  Description of Artificial Sequence: Synthetic polynucleotide
agcgcccaatacgcaaaccgcctctccccgcgcgttggccgattcattaatgcagctggcacgacaggtttcccgactggaaagcgggcagtgagcgcaacgcaattaatgtgagttagctcactcattaggcaccccaggctttacactttatgcttccggctcgtatgttgtgtggaattgtgagcggataacaatttcacacaggaaacagctatgaccatgattacgccaagctatttaggtgacactatagaatactcaagctatgcatcaagcttggtaccgagctcggatccactagtaacggccgccagtgtgctggaattcgcccttttaagacccactttcacatttaagttgtttttctaatccgcagatgatcaattcaaggccgaataagaaggctggctctgcaccttggtgatcaaataattcgatagcttgtcgtaataatggcggcatactatcagtagtaggtgtttccctttcttctttagcgacttgatgctcttgatcttccaatacgcaacctaaagtaaaatgccccacagcgctgagtgcatataatgcattctctagtgaaaaaccttgttggcataaaaaggctaattgattttcgagagtttcatactgtttttctgtaggccgtgtacctaaatgtacttttgctccatcgcgatgacttagtaaagcacatctaaaacttttagcgttattacgtaaaaaatcttgccagctttccccttctaaagggcaaaagtgagtatggtgcctatctaacatctcaatggctaaggcgtcgagcaaagcccgcttattttttacatgccaatacaatgtaggctgctctacacctagcttctgggcgagtttacgggttgttaaaccttcgattccgacctcattaagcagctctaatgcgctgttaatcactttacttttatctaatctagacatcattaattcctaatttttgttgacactctatcattgatagagttattttaccactccctatcagtgatagagaaaagtgaaaggaggtaaattatgcaattggaagttcgcctgttggagagcggtggtggacttgtgaaacccgagggaagccttaaactttcgtgcgttgctagtgggttcacattttcagactatttcatgtcctgggtccgtcaagccccgggaaaaggacttgaatgggttgcccatatttacaccaagagctataactatgccacatactattctggaagcgttaaaggtcgttttaccatttcgcgtgacgacagccgttctatggtgtatttgcagatgaataaccttcgtacagaagatacggctacttactactgtactcgcgatggatcaggctatcccagtttagatttctggggacagggtactcaggttactgtttcaagcggtggaggcggctctggcggtggtgggagtggaggcggtggcagttacgagctgacgcagccaccctcggcaagtgtaaacgtgggcgaaacggtgaaaattacttgttcgggggatcaactgcccaaatacttcgccgattggtttcatcaacgttccgatcagactattttacaagtgatttatgatgataacaaacgtccgtcaggaatcccagagcgtatcagcggatcgagcagcggaacaacagcaactttgaccatccgcgatgtccgtgccgaagacgagggggactactattgtttctctggatacgtggactcagacagcaagctgtatgtttttggctcaggaacacaactgaccgtactgggcaagggcgagctcaattcgaagcttgaaggtaagcctatccctaaccctctcctcggcctcgattctacgcgtaccggtcatcatcaccatcaccattgagcatgcggtctcaggaggaagggcgaattctgcagatatccatcacactggcggccgctcgagcatgcatctagagggcccaattcgccctatagtgagtcgtattacaattcactggccgtcgttttacaacgtcgtgactgggaaaaccctggcgttacccaacttaatcgccttgcagcacatccccctttcgccagctggcgtaatagcgaagaggcccgcaccgatcgcccttcccaacagttgcgcagcctatacgtacggcagtttaaggtttacacctataaaagagagagccgttatcgtctgtttgtggatgtacagagtgatattattgacacgccggggcgacggatggtgatccccctggccagtgcacgtctgctgtcagataaagtctcccgtgaactttacccggtggtgcatatcggggatgaaagctggcgcatgatgaccaccgatatggccagtgtgccggtctccgttatcggggaagaagtggctgatctcagccaccgcgaaaatgacatcaaaaacgccattaacctgatgttctggggaatataaatgtcaggcatgagattatcaaaaaggatcttcacctagatccttttcacgtagaaagccagtccgcagaaacggtgctgaccccggatgaatgtcagctactgggctatctggacaagggaaaacgcaagcgcaaagagaaagcaggtagcttgcagtgggcttacatggcgatagctagactgggcggttttatggacagcaagcgaaccggaattgccagctggggcgccctctggtaaggttgggaagccctgcaaagtaaactggatggctttctcgccgccaaggatctgatggcgcaggggatcaagctctgatcaagagacaggatgaggatcgtttcgcatgattgaacaagatggattgcacgcaggttctccggccgcttgggtggagaggctattcggctatgactgggcacaacagacaatcggctgctctgatgccgccgtgttccggctgtcagcgcaggggcgcccggttctttttgtcaagaccgacctgtccggtgccctgaatgaactgcaagacgaggcagcgcggctatcgtggctggccacgacgggcgttccttgcgcagctgtgctcgacgttgtcactgaagcgggaagggactggctgctattgggcgaagtgccggggcaggatctcctgtcatctcaccttgctcctgccgagaaagtatccatcatggctgatgcaatgcggcggctgcatacgcttgatccggctacctgcccattcgaccaccaagcgaaacatcgcatcgagcgagcacgtactcggatggaagccggtcttgtcgatcaggatgatctggacgaagagcatcaggggctcgcgccagccgaactgttcgccaggctcaaggcgagcatgcccgacggcgaggatctcgtcgtgacccatggcgatgcctgcttgccgaatatcatggtggaaaatggccgcttttctggattcatcgactgtggccggctgggtgtggcggaccgctatcaggacatagcgttggctacccgtgatattgctgaagagcttggcggcgaatgggctgaccgcttcctcgtgctttacggtatcgccgctcccgattcgcagcgcatcgccttctatcgccttcttgacgagttcttctgaattattaacgcttacaatttcctgatgcggtattttctccttacgcatctgtgcggtatttcacaccgcatacaggtggcacttttcggggaaatgtgcgcggaacccctatttgtttatttttctaaatacattcaaatatgtatccgctcatgagacaataaccctgataaatgcttcaataatagcacgtgaggagggccaccatggccaagttgaccagtgccgttccggtgctcaccgcgcgcgacgtcgccggagcggtcgagttctggaccgaccggctcgggttctcccgggacttcgtggaggacgacttcgccggtgtggtccgggacgacgtgaccctgttcatcagcgcggtccaggaccaggtggtgccggacaacaccctggcctgggtgtgggtgcgcggcctggacgagctgtacgccgagtggtcggaggtcgtgtccacgaacttccgggacgcctccgggccggccatgaccgagatcggcgagcagccgtgggggcgggagttcgccctgcgcgacccggccggcaactgcgtgcacttcgtggccgaggagcaggactgacacgtgctaaaacttcatttttaatttaaaaggatctaggtgaagatcctttttgataatctcatgaccaaaatcccttaacgtgagttttcgttccactgagcgtcagaccccgtagaaaagatcaaaggatcttcttgagatcctttttttctgcgcgtaatctgctgcttgcaaacaaaaaaaccaccgctaccagcggtggtttgtttgccggatcaagagctaccaactctttttccgaaggtaactggcttcagcagagcgcagataccaaatactgtccttctagtgtagccgtagttaggccaccacttcaagaactctgtagcaccgcctacatacctcgctctgctaatcctgttaccagtggctgctgccagtggcgataagtcgtgtcttaccgggttggactcaagacgatagttaccggataaggcgcagcggtcgggctgaacggggggttcgtgcacacagcccagcttggagcgaacgacctacaccgaactgagatacctacagcgtgagctatgagaaagcgccacgcttcccgaagggagaaaggcggacaggtatccggtaagcggcagggtcggaacaggagagcgcacgagggagcttccagggggaaacgcctggtatctttatagtcctgtcgggtttcgccacctctgacttgagcgtcgatttttgtgatgctcgtcaggggggcggagcctatggaaaaacgccagcaacgcggcctttttacggttcctgggcttttgctggccttttgctcacatgttctttcctgcgttatcccctgattctgtggataaccgtattaccgcctttgagtgagctgataccgctcgccgcagccgaacgaccgagcgcagcgagtcagtgagcgaggaagcggaag

SEQ ID NO: 976 - DNA, 846 bp, Artificial Sequence
  Description of Artificial Sequence: Synthetic polynucleotide
atgcaattggaagttcgcctgttggagagcggtggtggacttgtgaaacccgagggaagccttaaactttcgtgcgttgctagtgggttcacattttcagactatttcatgtcctgggtccgtcaagccccgggaaaaggacttgaatgggttgcccatatttacaccaagagctataactatgccacatactattctggaagcgttaaaggtcgttttaccatttcgcgtgacgacagccgttctatggtgtatttgcagatgaataaccttcgtacagaagatacggctacttactactgtactcgcgatggatcaggctatcccagtttagatttctggggacagggtactcaggttactgtttcaagcggtggaggcggctctggcggtggtgggagtggaggcggtggcagttacgagctgacgcagccaccctcggcaagtgtaaacgtgggcgaaacggtgaaaattacttgttcgggggatcaactgcccaaatacttcgccgattggtttcatcaacgttccgatcagactattttacaagtgatttatgatgataacaaacgtccgtcaggaatcccagagcgtatcagcggatcgagcagcggaacaacagcaactttgaccatccgcgatgtccgtgccgaagacgagggggactactattgtttctctggatacgtggactcagacagcaagctgtatgtttttggctcaggaacacaactgaccgtactgggcaagggcgagctcaattcgaagcttgaaggtaagcctatccctaaccctctcctcggcctcgattctacgcgtaccggtcatcatcaccatcaccattga

SEQ ID NO: 977 - DNA, 363 bp, Artificial Sequence
  Description of Artificial Sequence: Synthetic polynucleotide
gaagttcgcctgttggagagcggtggtggacttgtgaaacccgagggaagccttaaactttcgtgcgttgctagtgggttcacattttcagactatttcatgtcctgggtccgtcaagccccgggaaaaggacttgaatgggttgcccatatttacaccaagagctataactatgccacatactattctggaagcgttaaaggtcgttttaccatttcgcgtgacgacagccgttctatggtgtatttgcagatgaataaccttcgtacagaagatacggctacttactactgtactcgcgatggatcaggctatcccagtttagatttctggggacagggtactcaggttactgtttcaagc

SEQ ID NO: 978 - DNA, 330 bp, Artificial Sequence
  Description of Artificial Sequence: Synthetic polynucleotide
tacgagctgacgcagccaccctcggcaagtgtaaacgtgggcgaaacggtgaaaattacttgttcgggggatcaactgcccaaatacttcgccgattggtttcatcaacgttccgatcagactattttacaagtgatttatgatgataacaaacgtccgtcaggaatcccagagcgtatcagcggatcgagcagcggaacaacagcaactttgaccatccgcgatgtccgtgccgaagacgagggggactactattgtttctctggatacgtggactcagacagcaagctgtatgtttttggctcaggaacacaactgaccgtactgggc

SEQ ID NO: 979 - DNA, 45 bp, Artificial Sequence
  Description of Artificial Sequence: Synthetic oligonucleotide
ggtggaggcggctctggcggtggtgggagtggaggcggtggcagt

SEQ ID NO: 980 - protein, 281 aa, Artificial Sequence
  Description of Artificial Sequence: Synthetic polypeptide
MQLEVRLLESGGGLVKPEGSLKLSCVASGFTFSDYFMSWVRQAPGKGLEWVAHIYTKSYNYATYYSGSVKGRFTISRDDSRSMVYLQMNNLRTEDTATYYCTRDGSGYPSLDFWGQGTQVTVSSGGGGSGGGGSGGGGSYELTQPPSASVNVGETVKITCSGDQLPKYFADWFHQRSDQTILQVIYDDNKRPSGIPERISGSSSGTTATLTIRDVRAEDEGDYYCFSGYVDSDSKLYVFGSGTQLTVLGKGELNSKLEGKPIPNPLLGLDSTRTGHHHHHH

SEQ ID NO: 981 - DNA, 1668 bp, Artificial Sequence
  Description of Artificial Sequence: Synthetic polynucleotide
ttaagacccactttcacatttaagttgtttttctaatccgcagatgatcaattcaaggccgaataagaaggctggctctgcaccttggtgatcaaataattcgatagcttgtcgtaataatggcggcatactatcagtagtaggtgtttccctttcttctttagcgacttgatgctcttgatcttccaatacgcaacctaaagtaaaatgccccacagcgctgagtgcatataatgcattctctagtgaaaaaccttgttggcataaaaaggctaattgattttcgagagtttcatactgtttttctgtaggccgtgtacctaaatgtacttttgctccatcgcgatgacttagtaaagcacatctaaaacttttagcgttattacgtaaaaaatcttgccagctttccccttctaaagggcaaaagtgagtatggtgcctatctaacatctcaatggctaaggcgtcgagcaaagcccgcttattttttacatgccaatacaatgtaggctgctctacacctagcttctgggcgagtttacgggttgttaaaccttcgattccgacctcattaagcagctctaatgcgctgttaatcactttacttttatctaatctagacataattaattcctaatttttgttgacactctatcattgatagagttattttaccactccctatcagtgatagagaaaagtgaaaggaggtaaattatgactagtaaacaatcgaccatcgcattggcgctgcttcctctattgttcacaccggtgacaaaggcagtcgactataaggatgacgacgacaagcaattgggcggtggcatggaagttcgcctgttggagagcggtggaggacttgtgaagcccgagggaagccttaaactttcgtgcgttgctagtgggttcacattttcagactatttcatgtcctgggtccgtcaagccccgggaaaaggacttgaatgggttgcccatatttacaccaagagctataactatgccacatactattctggaagcgttaaaggtcgttttaccatttcgcgtgacgacagccgttctatggtgtatttgcagatgaataaccttcgtacagaagatacggctacttactactgtactcgcgatggatcaggctatcccagtttagatttctggggacagggtactcaggttactgtttcaagcggtggaggcggctctggcggtggtgggagtggaggcggtggcagttacgagctgacgcagccgccctcggcaagtgtaaacgtgggcgaaacggtgaaaattacttgttcgggggatcaactgcccaaatacttcgccgattggtttcatcaacgttccgatcagactattttacaagtgatttatgatgataacaaacgtccgtcaggaatcccagagcgtatcagcggatcgagcagcggaacaacagcaactttgaccatccgcgatgtccgtgccgaagacgagggggactactattgtttctctggatacgtggactcagacagcaagctgtatgtttttggctcaggaacacaactgaccgtactgggcaagggcgagctcaattcgaagcttgaaggtaagcctatccctaaccctctcctcggactcgattctacgggatccggtcatcatcaccatcaccattga

SEQ ID NO: 982 - protein, 313 aa, Artificial Sequence
  Description of Artificial Sequence: Synthetic polypeptide
KQSTIALALLPLLFTPVTKAVDYKDDDDKQLGGGMEVRLLESGGGLVKPEGSLKLSCVASGFTFSDYFMSWVRQAPGKGLEWVAHIYTKSYNYATYYSGSVKGRFTISRDDSRSMVYLQMNNLRTEDTATYYCTRDGSGYPSLDFWGQGTQVTVSSGGGGSGGGGSGGGGSYELTQPPSASVNVGETVKITCSGDQLPKYFADWFHQRSDQTILQVIYDDNKRPSGIPERISGSSSGTTATLTIRDVRAEDEGDYYCFSGYVDSDSKLYVFGSGTQLTVLGKGELNSKLEGKPIPNPLLGLDSTGSGHHHHHH

SEQ ID NO: 983 - DNA, 1674 bp, Artificial Sequence
  Description of Artificial Sequence: Synthetic polynucleotide
ttaagacccactttcacatttaagttgtttttctaatccgcagatgatcaattcaaggccgaataagaaggctggctctgcaccttggtgatcaaataattcgatagcttgtcgtaataatggcggcatactatcagtagtaggtgtttccctttcttctttagcgacttgatgctcttgatcttccaatacgcaacctaaagtaaaatgccccacagcgctgagtgcatataatgcattctctagtgaaaaaccttgttggcataaaaaggctaattgattttcgagagtttcatactgtttttctgtaggccgtgtacctaaatgtacttttgctccatcgcgatgacttagtaaagcacatctaaaacttttagcgttattacgtaaaaaatcttgccagctttccccttctaaagggcaaaagtgagtatggtgcctatctaacatctcaatggctaaggcgtcgagcaaagcccgcttattttttacatgccaatacaatgtaggctgctctacacctagcttctgggcgagtttacgggttgttaaaccttcgattccgacctcattaagcagctctaatgcgctgttaatcactttacttttatctaatctagacatcattaattcctaatttttgttgacactctatcattgatagagttattttaccactccctatcagtgatagagaaaagtgaaaggaggtaaattatgactagtatgatgaagcgtaacatcttagccgttattgtccccgcattgcttgtggccgggacggctaacgcagtcgactataaggatgacgacgacaagcaattgggcggtggcatggaagttcgcctgttggagagcggtggaggacttgtgaagcccgagggaagccttaaactttcgtgcgttgctagtgggttcacattttcagactatttcatgtcctgggtccgtcaagccccgggaaaaggacttgaatgggttgcccatatttacaccaagagctataactatgccacatactattctggaagcgttaaaggtcgttttaccatttcgcgtgacgacagccgttctatggtgtatttgcagatgaataaccttcgtacagaagatacggctacttactactgtactcgcgatggatcaggctatcccagtttagatttctggggacagggtactcaggttactgtttcaagcggtggaggcggctctggcggtggtgggagtggaggcggtggcagttacgagctgacgcagccgccctcggcaagtgtaaacgtgggcgaaacggtgaaaattacttgttcgggggatcaactgcccaaatacttcgccgattggtttcatcaacgttccgatcagactattttacaagtgatttatgatgataacaaacgtccgtcaggaatcccagagcgtatcagcggatcgagcagcggaacaacagcaactttgaccatccgcgatgtccgtgccgaagacgagggggactactattgtttctctggatacgtggactcagacagcaagctgtatgtttttggctcaggaacacaactgaccgtactgggcaagggcgagctcaattcgaagcttgaaggtaagcctatccctaaccctctcctcggactcgattctacgggatccggtcatcatcaccatcaccattga

SEQ ID NO: 984 - protein, 315 aa, Artificial Sequence
  Description of Artificial Sequence: Synthetic polypeptide
MMKRNILAVIVPALLVAGTANAVDYKDDDDKQLGGGMEVRLLESGGGLVKPEGSLKLSCVASGFTFSDYFMSWVRQAPGKGLEWVAHIYTKSYNYATYYSGSVKGRFTISRDDSRSMVYLQMNNLRTEDTATYYCTRDGSGYPSLDFWGQGTQVTVSSGGGGSGGGGSGGGGSYELTQPPSASVNVGETVKITCSGDQLPKYFADWFHQRSDQTILQVIYDDNKRPSGIPERISGSSSGTTATLTIRDVRAEDEGDYYCFSGYVDSDSKLYVFGSGTQLTVLGKGELNSKLEGKPIPNPLLGLDSTGSGHHHHHH

SEQ ID NO: 985 - DNA, 1668 bp, Artificial Sequence
  Description of Artificial Sequence: Synthetic polynucleotide
ttaagacccactttcacatttaagttgtttttctaatccgcagatgatcaattcaaggccgaataagaaggctggctctgcaccttggtgatcaaataattcgatagcttgtcgtaataatggcggcatactatcagtagtaggtgtttccctttcttctttagcgacttgatgctcttgatcttccaatacgcaacctaaagtaaaatgccccacagcgctgagtgcatataatgcattctctagtgaaaaaccttgttggcataaaaaggctaattgattttcgagagtttcatactgtttttctgtaggccgtgtacctaaatgtacttttgctccatcgcgatgacttagtaaagcacatctaaaacttttagcgttattacgtaaaaaatcttgccagctttccccttctaaagggcaaaagtgagtatggtgcctatctaacatctcaatggctaaggcgtcgagcaaagcccgcttattttttacatgccaatacaatgtaggctgctctacacctagcttctgggcgagtttacgggttgttaaaccttcgattccgacctcattaagcagctctaatgcgctgttaatcactttacttttatctaatctagacatcattaattcctaatttttgttgacactctatcattgatagagttattttaccactccctatcagtgatagagaaaagtgaaaggaggtaaattatgactagtaaatatcttcttccaacggctgctgctggtttattgcttcttgccgcccagcctgcgatggctgtcgactataaggatgacgacgacaagcaattgggcggtggcatggaagttcgcctgttggagagcggtggaggacttgtgaagcccgagggaagccttaaactttcgtgcgttgctagtgggttcacattttcagactatttcatgtcctgggtccgtcaagccccgggaaaaggacttgaatgggttgcccatatttacaccaagagctataactatgccacatactattctggaagcgttaaaggtcgttttaccatttcgcgtgacgacagccgttctatggtgtatttgcagatgaataaccttcgtacagaagatacggctacttactactgtactcgcgatggatcaggctatcccagtttagatttctggggacagggtactcaggttactgtttcaagcggtggaggcggctctggcggtggtgggagtggaggcggtggcagttacgagctgacgcagccgccctcggcaagtgtaaacgtgggcgaaacggtgaaaattacttgttcgggggatcaactgcccaaatacttcgccgattggtttcatcaacgttccgatcagactattttacaagtgatttatgatgataacaaacgtccgtcaggaatcccagagcgtatcagcggatcgagcagcggaacaacagcaactttgaccatccgcgatgtccgtgccgaagacgagggggactactattgtttctctggatacgtggactcagacagcaagctgtatgtttttggctcaggaacacaactgaccgtactgggcaagggcgagctcaattcgaagcttgaaggtaagcctatccctaaccctctcctcggactcgattctacgggatccggtcatcatcaccatcaccat

SEQ ID NO: 986 - protein, 314 aa, Artificial Sequence
  Description of Artificial Sequence: Synthetic polypeptide
KYLLPTAAAGLLLLAAQPAMAVDYKDDDDKQLGGGMEVRLLESGGGLVKPEGSLKLSCVASGFTFSDYFMSWVRQAPGKGLEWVAHIYTKSYNYATYYSGSVKGRFTISRDDSRSMVYLQMNNLRTEDTATYYCTRDGSGYPSLDFWGQGTQVTVSSGGGGSGGGGSGGGGSYELTQPPSASVNVGETVKITCSGDQLPKYFADWFHQRSDQTILQVIYDDNKRPSGIPERISGSSSGTTATLTIRDVRAEDEGDYYCFSGYVDSDSKLYVFGSGTQLTVLGKGELNSKLEGKPIPNPLLGLDSTGSGHHHHHH

SEQ ID NO: 987 - DNA, 5708 bp, Artificial Sequence
  Description of Artificial Sequence: Synthetic polynucleotide
tagcggagtgtatactggcttactatgttggcactgatgagggtgtcagtgaagtgcttcatgtggcaggagaaaaaaggctgcaccggtgcgtcagcagaatatgtgatacaggatatattccgcttcctcgctcactgactcgctacgctcggtcgttcgactgcggcgagcggaaatggcttacgaacggggcggagatttcctggaagatgccaggaagatacttaacagggaagtgagagggccgcggcaaagccgtttttccataggctccgcccccctgacaagcatcacgaaatctgacgctcaaatcagtggtggcgaaacccgacaggactataaagataccaggcgtttcccctggcggctccctcgtgcgctctcctgttcctgcctttcggtttaccggtgtcattccgctgttatggccgcgtttgtctcattccacgcctgacactcagttccgggtaggcagttcgctccaagctggactgtatgcacgaaccccccgttcagtccgaccgctgcgccttatccggtaactatcgtcttgagtccaacccggaaagacatgcaaaagcaccactggcagcagccactggtaattgatttagaggagttagtcttgaagtcatgcgccggttaaggctaaactgaaaggacaagttttggtgactgcgctcctccaagccagttacctcggttcaaagagttggtagctcagagaaccttcgaaaaaccgccctgcaaggcggttttttcgttttcagagcaagagattacgcgcagaccaaaacgatctcaagaagatcatcttattaaggggtctgacgctcagtggaacggtgcaccctgcagggctagctgataaagcgttcgcgctgcattcggcagtttaagacccactttcacatttaagttgtttttctaatccgcatatgatcaattcaaggccgaataagaaggctggctctgcaccttggtgatcaaataattcgatagcttgtcgtaataatggcggcatactatcagtagtaggtgtttccctttcttctttagcgacttgatgctcttgatcttccaatacgcaacctaaagtaaaatgccccacagcgctgagtgcatataatgcattctctagtgaaaaaccttgttggcataaaaaggctaattgattttcgagagtttcatactgtttttctgtaggccgtgtacctaaatgtacttttgctccatcgcgatgacttagtaaagcacatctaaaacttttagcgttattacgtaaaaaatcttgccagctttccccttctaaagggcaaaagtgagtatggtgcctatctaacatctcaatggctaaggcgtcgagcaaagcccgcttattttttacatgccaatacaatgtaggctgctctacacctagcttctgggcgagtttacgggttgttaaaccttcgattccgacctcattaagcagctctaatgcgctgttaatcactttacttttatctaatctagacatcattaattcctaatttttgttgacactctatcattgatagagttattttaccactccctatcagtgatagagaaaagtgaaaggaggtaaattatgactagtatggttttccaacccatcagcgaatttttgctgattcgtaacgctgggatgtccatgtattttaacaagatcatttcttttaacatcatttcacgtatcgttatttgcatttttcttatctgtggtatgttcatggccggtgcatctgaaaagtatgatgcaaacgcaccccaacaggtgcagccatactcggtttcatcatcagcgttcgagaatctgcaccccaataacgagatggagtcgagtatcaacccttttagtgcttcggacaccgagcgtaatgcagctatcatcgatcgtgctaacaaggaacaagaaacggaagcagtcaacaaaatgatctccactggcgctcgtttagctgccagcggtcgcgcgtccgatgtggcgcacagtatggtaggggatgcggtcaaccaggagattaaacaatggctgaatcgcttcggcactgctcaagtgaatttaaattttgacaagaacttctcgttaaaggagtcttcgcttgactggttggccccatggtacgattcggcgtcattccttttcttttctcagttgggcatccgtaacaaggacagtcgtaatacacttaaccttggtgttggcattcgcacattagaaaatggttggttgtatggcctgaacaccttttacgacaatgacttaacgggacacaatcaccgtatcgggctgggcgccgaggcgtggactgactacttgcagttagccgcgaatgggtacttccgtcttaatggttggcactcttcccgtgacttcagcgactacaaagaacgccctgctaccgggggagatttgcgtgcgaatgcgtacctgcccgctcttccgcaacttggcgggaagttaatgtatgagcagtatactggggaacgcgtggctctgttcggaaaggacaacctgcagcgcaacccatacgctgtcactgcgggtatcaactatacgccagttccgttgctgacggtcggcgtggatcaacgtatggggaagtcgagtaaacatgaaacgcaatggaatttacaaatgaactatcgcttaggggagagtttccaaagtcagcttagcccttcggcggtcgcagggactcgtttgcttgctgagtcccgctacaacctggttgatcgcaataacaatatcgtactggaataccagaaacaacaagtggttaagctgacgttgagccctgcgaccatcagtggattgcccggacaagtttaccaggtaaatgcccaggtccagggggcctctgcggttcgcgaaattgtctggtcagacgcagaattaatcgctgcaggaggcaccttaacgccactttccactacacaattcaatttagtccttcccccatacaaacgtaccgcccaggtatcgcgcgtaactgatgacttaactgctaatttttattcactgtcggcgttagcagttgaccatcaaggcaaccgtagtaattccttcacattatctgtaacggtgcagcagccgcaactgacgcttaccgcagcggtcattggtgatggggccccagctaatgggaaaaccgcaatcactgtcgagttcacagttgcagattttgaaggcaagccgctggcgggtcaggaggttgtgattacgactaataacggtgctcttcctaataagattactgaaaagactgacgctaacggcgttgcccgcattgcccttacgaacacaaccgatggggtcacggtagttaccgcagaggtcgaggggcaacgccaatccgttgacacgcacttcgttaagggtactatcgcggccgataaaagcacgctggccgcggtcgactataaggatgacgacgacaagcaattggaagttcgcctgttggagagcggtggtggacttgtgaaacccgagggaagccttaaactttcgtgcgttgctagtgggttcacattttcagactatttcatgtcctgggtccgtcaagccccgggaaaaggacttgaatgggttgcccatatttacaccaagagctataactatgccacatactattctggaagcgttaaaggtcgttttaccatttcgcgtgacgacagccgttctatggtgtatttgcagatgaataaccttcgtacagaagatacggctacttactactgtactcgcgatggatcaggctatcccagtttagatttctggggacagggtactcaggttactgtttcaagcggtggaggcggctctggcggtggtgggagtggaggcggtggcagttacgagctgacgcagccaccctcggcaagtgtaaacgtgggcgaaacggtgaaaattacttgttcgggggatcaactgcccaaatacttcgccgattggtttcatcaacgttccgatcagactattttacaagtgatttatgatgataacaaacgtccgtcaggaatcccagagcgtatcagcggatcgagcagcggaacaacagcaactttgaccatccgcgatgtccgtgccgaagacgagggggactactattgtttctctggatacgtggactcagacagcaagctgtatgtttttggctcaggaacacaactgaccgtactgggcaagggcgagctcaattcgaagcttgaaggtaagcctatccctaaccctctcctcggcctcgattctacgcgtaccggtcatcatcaccatcaccattgagcatgctaatcagccgtggaattcgcaacgtaaaaaaacccgccccggcgggtttttttataccggtctcaggaggaacgattggtaaacccggtgaacgcatgagaaagcccccggaagatcaccttccgggggcttttttattgcgcggaccaaaacgaaaaaagacgctcgaaagcgtctcttttctggaatttggtaccgaggcgtaatgctctgccagtgttacaaccaattaaccaattctgattagaaaaactcatcgagcatcaaatgaaactgcaatttattcatatcaggattatcaataccatatttttgaaaaagccgtttctgtaatgaaggagaaaactcaccgaggcagttccataggatggcaagatcctggtatcggtctgcgattccgactcgtccaacatcaatacaacctattaatttcccctcgtcaaaaataaggttatcaagtgagaaatcaccatgagtgacgactgaatccggtgagaatggcaaaagcttatgcatttctttccagacttgttcaacaggccagccattacgctcgtcatcaaaatcactcgcatcaaccaaaccgttattcattcgtgattgcgcctgagcgagacgaaatacgcgatcgctgttaaaaggacaattacaaacaggaatcgaatgcaaccggcgcaggaacactgccagcgcatcaacaatattttcacctgaatcaggatattcttctaatacctggaatgctgttttcccggggatcgcagtggtgagtaaccatgcatcatcaggagtacggataaaatgcttgatggtcggaagaggcataaattccgtcagccagtttagtctgaccatctcatctgtaacatcattggcaacgctacctttgccatgtttcagaaacaactctggcgcatcgggcttcccatacaatcgatagattgtcgcacctgattgcccgacattatcgcgagcccatttatacccatataaatcagcatccatgttggaatttaatcgcggcctcgagcaagacgtttcccgttgaatatggctcataacaccccttgtattactgtttatgtaagcagacagttttattgttcatgatgatatatttttatcttgtgcaatgtaacatcagagattttgagacacaacgtggctttgttgaataaatcgaacttttgctgagttgaaggatcagatcacgcatcttcccgacaacgcagaccgttccgtggcaaagcaaaagttcaaaatcaccaactggtccacctacaacaaagctctcatcaaccgtggctccctcactttctggctggatgatggggcgattcaggcctggtatgagtcagcaacaccttcttcacgaggcagacctcagcgc

SEQ ID NO: 988 - DNA, 4282 bp, Artificial Sequence
  Description of Artificial Sequence: Synthetic polynucleotide
tagcggagtgtatactggcttactatgttggcactgatgagggtgtcagtgaagtgcttcatgtggcaggagaaaaaaggctgcaccggtgcgtcagcagaatatgtgatacaggatatattccgcttcctcgctcactgactcgctacgctcggtcgttcgactgcggcgagcggaaatggcttacgaacggggcggagatttcctggaagatgccaggaagatacttaacagggaagtgagagggccgcggcaaagccgtttttccataggctccgcccccctgacaagcatcacgaaatctgacgctcaaatcagtggtggcgaaacccgacaggactataaagataccaggcgtttcccctggcggctccctcgtgcgctctcctgttcctgcctttcggtttaccggtgtcattccgctgttatggccgcgtttgtctcattccacgcctgacactcagttccgggtaggcagttcgctccaagctggactgtatgcacgaaccccccgttcagtccgaccgctgcgccttatccggtaactatcgtcttgagtccaacccggaaagacatgcaaaagcaccactggcagcagccactggtaattgatttagaggagttagtcttgaagtcatgcgccggttaaggctaaactgaaaggacaagttttggtgactgcgctcctccaagccagttacctcggttcaaagagttggtagctcagagaaccttcgaaaaaccgccctgcaaggcggttttttcgttttcagagcaagagattacgcgcagaccaaaacgatctcaagaagatcatcttattaaggggtctgacgctcagtggaacggtgcaccctgcagggctagctgataaagcgttcgcgctgcattcggcagtttaagacccactttcacatttaagttgtttttctaatccgcatatgatcaattcaaggccgaataagaaggctggctctgcaccttggtgatcaaataattcgatagcttgtcgtaataatggcggcatactatcagtagtaggtgtttccctttcttctttagcgacttgatgctcttgatcttccaatacgcaacctaaagtaaaatgccccacagcgctgagtgcatataatgcattctctagtgaaaaaccttgttggcataaaaaggctaattgattttcgagagtttcatactgtttttctgtaggccgtgtacctaaatgtacttttgctccatcgcgatgacttagtaaagcacatctaaaacttttagcgttattacgtaaaaaatcttgccagctttccccttctaaagggcaaaagtgagtatggtgcctatctaacatctcaatggctaaggcgtcgagcaaagcccgcttattttttacatgccaatacaatgtaggctgctctacacctagcttctgggcgagtttacgggttgttaaaccttcgattccgacctcattaagcagctctaatgcgctgttaatcactttacttttatctaatctagacatcattaattcctaatttttgttgacactctatcattgatagagttattttaccactccctatcagtgatagagaaaagtgaaaggaggtaaattatgactagtaaagcaacaaaacttgtgttaggcgcggttatacttggctccaccctgcttgcaggttgctcgtctaacgcgaagatcgaccagggtatcaatccttacgtcgggtttgaaatgggatacgattggttgggacgtatgccttataagggaagtgttgaaaacggcgcttataaggcgcagggagtacagttaacggccaagcttgggtaccccataacagacgatttagatatttatacccgtttaggaggaatggtttggagagccgacacgaagtctaatgtatatggtaagaaccacgacacgggagtatcccccgtctttgcagggggagtggaatatgctatcacaccagagatcgctacccgtttggaatatcaatggacgaataatataggcgacgcccatacgataggaacgcggcccgacaacggcatccctggggtcgactataaggatgacgacgacaagcaattggaagttcgcctgttggagagcggtggtggacttgtgaaacccgagggaagccttaaactttcgtgcgttgctagtgggttcacattttcagactatttcatgtcctgggtccgtcaagccccgggaaaaggacttgaatgggttgcccatatttacaccaagagctataactatgccacatactattctggaagcgttaaaggtcgttttaccatttcgcgtgacgacagccgttctatggtgtatttgcagatgaataaccttcgtacagaagatacggctacttactactgtactcgcgatggatcaggctatcccagtttagatttctggggacagggtactcaggttactgtttcaagcggtggaggcggctctggcggtggtgggagtggaggcggtggcagttacgagctgacgcagccaccctcggcaagtgtaaacgtgggcgaaacggtgaaaattacttgttcgggggatcaactgcccaaatacttcgccgattggtttcatcaacgttccgatcagactattttacaagtgatttatgatgataacaaacgtccgtcaggaatcccagagcgtatcagcggatcgagcagcggaacaacagcaactttgaccatccgcgatgtccgtgccgaagacgagggggactactattgtttctctggatacgtggactcagacagcaagctgtatgtttttggctcaggaacacaactgaccgtactgggcaagggcgagctcaattcgaagcttgaaggtaagcctatccctaaccctctcctcggcctcgattctacgcgtaccggtcatcatcaccatcaccattgagcatgcgaattcggtctcaggaggaacgattggtaaacccggtgaacgcatgagaaagcccccggaagatcaccttccgggggcttttttattgcgcggaccaaaacgaaaaaagacgctcgaaagcgtctcttttctggaatttggtaccgaggcgtaatgctctgccagtgttacaaccaattaaccaattctgattagaaaaactcatcgagcatcaaatgaaactgcaatttattcatatcaggattatcaataccatatttttgaaaaagccgtttctgtaatgaaggagaaaactcaccgaggcagttccataggatggcaagatcctggtatcggtctgcgattccgactcgtccaacatcaatacaacctattaatttcccctcgtcaaaaataaggttatcaagtgagaaatcaccatgagtgacgactgaatccggtgagaatggcaaaagcttatgcatttctttccagacttgttcaacaggccagccattacgctcgtcatcaaaatcactcgcatcaaccaaaccgttattcattcgtgattgcgcctgagcgagacgaaatacgcgatcgctgttaaaaggacaattacaaacaggaatcgaatgcaaccggcgcaggaacactgccagcgcatcaacaatattttcacctgaatcaggatattcttctaatacctggaatgctgttttcccggggatcgcagtggtgagtaaccatgcatcatcaggagtacggataaaatgcttgatggtcggaagaggcataaattccgtcagccagtttagtctgaccatctcatctgtaacatcattggcaacgctacctttgccatgtttcagaaacaactctggcgcatcgggcttcccatacaatcgatagattgtcgcacctgattgcccgacattatcgcgagcccatttatacccatataaatcagcatccatgttggaatttaatcgcggcctcgagcaagacgtttcccgttgaatatggctcataacaccccttgtattactgtttatgtaagcagacagttttattgttcatgatgatatatttttatcttgtgcaatgtaacatcagagattttgagacacaacgtggctttgttgaataaatcgaacttttgctgagttgaaggatcagatcacgcatcttcccgacaacgcagaccgttccgtggcaaagcaaaagttcaaaatcaccaactggtccacctacaacaaagctctcatcaaccgtggctccctcactttctggctggatgatggggcgattcaggcctggtatgagtcagcaacaccttcttcacgaggcagacctcagcgc

SEQ ID NO: 989 - DNA, 5864 bp, Artificial Sequence
  Description of Artificial Sequence: Synthetic polynucleotide
tagcggagtgtatactggcttactatgttggcactgatgagggtgtcagtgaagtgcttcatgtggcaggagaaaaaaggctgcaccggtgcgtcagcagaatatgtgatacaggatatattccgcttcctcgctcactgactcgctacgctcggtcgttcgactgcggcgagcggaaatggcttacgaacggggcggagatttcctggaagatgccaggaagatacttaacagggaagtgagagggccgcggcaaagccgtttttccataggctccgcccccctgacaagcatcacgaaatctgacgctcaaatcagtggtggcgaaacccgacaggactataaagataccaggcgtttcccctggcggctccctcgtgcgctctcctgttcctgcctttcggtttaccggtgtcattccgctgttatggccgcgtttgtctcattccacgcctgacactcagttccgggtaggcagttcgctccaagctggactgtatgcacgaaccccccgttcagtccgaccgctgcgccttatccggtaactatcgtcttgagtccaacccggaaagacatgcaaaagcaccactggcagcagccactggtaattgatttagaggagttagtcttgaagtcatgcgccggttaaggctaaactgaaaggacaagttttggtgactgcgctcctccaagccagttacctcggttcaaagagttggtagctcagagaaccttcgaaaaaccgccctgcaaggcggttttttcgttttcagagcaagagattacgcgcagaccaaaacgatctcaagaagatcatcttattaaggggtctgacgctcagtggaacggtgcaccctgcagggctagctgataaagcgttcgcgctgcattcggcagtttaagacccactttcacatttaagttgtttttctaatccgcatatgatcaattcaaggccgaataagaaggctggctctgcaccttggtgatcaaataattcgatagcttgtcgtaataatggcggcatactatcagtagtaggtgtttccctttcttctttagcgacttgatgctcttgatcttccaatacgcaacctaaagtaaaatgccccacagcgctgagtgcatataatgcattctctagtgaaaaaccttgttggcataaaaaggctaattgattttcgagagtttcatactgtttttctgtaggccgtgtacctaaatgtacttttgctccatcgcgatgacttagtaaagcacatctaaaacttttagcgttattacgtaaaaaatcttgccagctttccccttctaaagggcaaaagtgagtatggtgcctatctaacatctcaatggctaaggcgtcgagcaaagcccgcttattttttacatgccaatacaatgtaggctgctctacacctagcttctgggcgagtttacgggttgttaaaccttcgattccgacctcattaagcagctctaatgcgctgttaatcactttacttttatctaatctagacatcattaattcctaatttttgttgacactctatcattgatagagttattttaccactccctatcagtgatagagaaaagtgaaaggaggtaaattatgactagtattacgcatggctgttatacccgtacgcgtcataaacacaagttgaagaaaactctgatcatgttatccgctggacttggactttttttttacgtgaatcagaactctttcgctaatggggaaaattattttaaactgggatcagacagcaaattacttacgcatgactcataccagaatcgtctgttttatacgctgaaaactggtgaaaccgttgcagatttaagtaaaagtcaggacattaacctgtcaactatttggtcacttaataaacacttatattcgagcgaatcggaaatgatgaaagctgcaccggggcaacaaatcatcttgcccctgaagaaattgccctttgaatactccgctttgcccttgctgggctcggctcctctggtagccgccggaggcgttgccggtcacactaataagctgacaaaaatgtcacccgacgtgacgaagagcaacatgacggatgataaggctttaaattacgcagctcagcaagcggcctcgttgggaagtcagttacagagtcgttcgttaaatggtgattatgctaaggataccgcattgggtattgccggcaaccaagcgtcgagccaacttcaggcatggttgcaacattacggcactgctgaagtaaatctgcaatcaggtaataattttgacggtagttccctggatttccttttacctttttacgattcagaaaagatgttggctttcggacaggtgggggcgcgttacatcgattcacgttttaccgctaacttgggggccggtcaacgcttcttcttacctgccaatatgttgggctataatgtatttatcgaccaggacttcagtggtgacaatacacgtctgggaattggtggagagtattggcgcgattactttaagtcatctgtaaatggctattttcgcatgagcggttggcatgaaagttacaacaagaaagactacgatgagcgccccgcgaacgggtttgacatccgttttaatggttatttgccatcttatcccgccttgggagctaaattaatctacgagcaatactatggagataacgtagctttgtttaatagcgacaagttacagtctaatccaggagcggctacagtgggagttaattataccccaatcccactggtcacaatgggaatcgattatcgccacgggactggtaatgaaaacgatttattatactccatgcagtttcgttatcagttcgataagagttggtcgcagcagattgagcctcaatatgttaacgaattacgtaccttgtccggcagtcgctacgatctggtacaacgcaataacaatatcatccttgagtataagaaacaggacattctgtctttgaacattccacatgatattaatggtaccgagcactcaacacaaaaaattcagctgattgtgaaatcaaagtatggactggaccgtatcgtgtgggatgatagcgctctgcgcagtcagggtggacagatccagcactcgggtagccagtctgcccaagactaccaggctatcctgccagcgtatgtccaagggggaagtaacatctacaaagttacagctcgcgcctattaccgcaacggtaattctagtaataatgtgcagttgacaattacggtgctgtccaatgggcaggtcgtcgatcaggtaggtgtgacggattttacagccgataaaacctctgcgaaggcagataacgcggataccatcacatacactgccactgtaaaaaaaaacggtgtcgcgcaggcaaacgttcctgttagcttcaacatcgtgtcgggtacagccacccttggggccaactcggcaaagactgacgcgaatggcaaggctacagtcacgttgaaatcctcgacaccaggacaggtcgttgtgtctgccaagacagcagagatgacctccgcccttaatgcatctgctgttatcttcttcgatcaaacgaaggcatctgtcgactataaggatgacgacgacaagcaattggaagttcgcctgttggagagcggtggtggacttgtgaaacccgagggaagccttaaactttcgtgcgttgctagtgggttcacattttcagactatttcatgtcctgggtccgtcaagccccgggaaaaggacttgaatgggttgcccatatttacaccaagagctataactatgccacatactattctggaagcgttaaaggtcgttttaccatttcgcgtgacgacagccgttctatggtgtatttgcagatgaataaccttcgtacagaagatacggctacttactactgtactcgcgatggatcaggctatcccagtttagatttctggggacagggtactcaggttactgtttcaagcggtggaggcggctctggcggtggtgggagtggaggcggtggcagttacgagctgacgcagccaccctcggcaagtgtaaacgtgggcgaaacggtgaaaattacttgttcgggggatcaactgcccaaatacttcgccgattggtttcatcaacgttccgatcagactattttacaagtgatttatgatgataacaaacgtccgtcaggaatcccagagcgtatcagcggatcgagcagcggaacaacagcaactttgaccatccgcgatgtccgtgccgaagacgagggggactactattgtttctctggatacgtggactcagacagcaagctgtatgtttttggctcaggaacacaactgaccgtactgggcaagggcgagctcaattcgaagcttgaaggtaagcctatccctaaccctctcctcggcctcgattctacgcgtaccggtcatcatcaccatcaccattgagcatgctaatcagccgtggaattcgcaacgtaaaaaaacccgccccggcgggtttttttataccggtctcaggaggaacgattggtaaacccggtgaacgcatgagaaagcccccggaagatcaccttccgggggcttttttattgcgcggaccaaaacgaaaaaagacgctcgaaagcgtctcttttctggaatttggtaccgaggcgtaatgctctgccagtgttacaaccaattaaccaattctgattagaaaaactcatcgagcatcaaatgaaactgcaatttattcatatcaggattatcaataccatatttttgaaaaagccgtttctgtaatgaaggagaaaactcaccgaggcagttccataggatggcaagatcctggtatcggtctgcgattccgactcgtccaacatcaatacaacctattaatttcccctcgtcaaaaataaggttatcaagtgagaaatcaccatgagtgacgactgaatccggtgagaatggcaaaagcttatgcatttctttccagacttgttcaacaggccagccattacgctcgtcatcaaaatcactcgcatcaaccaaaccgttattcattcgtgattgcgcctgagcgagacgaaatacgcgatcgctgttaaaaggacaattacaaacaggaatcgaatgcaaccggcgcaggaacactgccagcgcatcaacaatattttcacctgaatcaggatattcttctaatacctggaatgctgttttcccggggatcgcagtggtgagtaaccatgcatcatcaggagtacggataaaatgcttgatggtcggaagaggcataaattccgtcagccagtttagtctgaccatctcatctgtaacatcattggcaacgctacctttgccatgtttcagaaacaactctggcgcatcgggcttcccatacaatcgatagattgtcgcacctgattgcccgacattatcgcgagcccatttatacccatataaatcagcatccatgttggaatttaatcgcggcctcgagcaagacgtttcccgttgaatatggctcataacaccccttgtattactgtttatgtaagcagacagttttattgttcatgatgatatatttttatcttgtgcaatgtaacatcagagattttgagacacaacgtggctttgttgaataaatcgaacttttgctgagttgaaggatcagatcacgcatcttcccgacaacgcagaccgttccgtggcaaagcaaaagttcaaaatcaccaactggtccacctacaacaaagctctcatcaaccgtggctccctcactttctggctggatgatggggcgattcaggcctggtatgagtcagcaacaccttcttcacgaggcagacctcagcgc

SEQ ID NO: 990 - protein, 607 aa, Artificial Sequence
  Description of Artificial Sequence: Synthetic polypeptide
MVFQPISEFLLIRNAGMSMYFNKIISFNIISRIVICIFLICGMFMAGASEKYDANAPQQVQPYSVSSSAFENLHPNNEMESSINPFSASDTERNAAIIDRANKEQETEAVNKMISTGARLAASGRASDVAHSMVGDAVNQEIKQWLNRFGTAQVNLNFDKNFSLKESSLDWLAPWYDSASFLFFSQLGIRNKDSRNTLNLGVGIRTLENGWLYGLNTFYDNDLTGHNHRIGLGAEAWTDYLQLAANGYFRLNGWHSSRDFSDYKERPATGGDLRANAYLPALPQLGGKLMYEQYTGERVALFGKDNLQRNPYAVTAGINYTPVPLLTVGVDQRMGKSSKHETQWNLQMNYRLGESFQSQLSPSAVAGTRLLAESRYNLVDRNNNIVLEYQKQQVVKLTLSPATISGLPGQVYQVNAQVQGASAVREIVWSDAELIAAGGTLTPLSTTQFNLVLPPYKRTAQVSRVTDDLTANFYSLSALAVDHQGNRSNSFTLSVTVQQPQLTLTAAVIGDGAPANGKTAITVEFTVADFEGKPLAGQEVVITTNNGALPNKITEKTDANGVARIALTNTTDGVTVVTAEVEGQRQSVDTHFVKGTIAADKSTLAAV

SEQ ID NO: 991 - protein, 148 aa, Artificial Sequence
  Description of Artificial Sequence: Synthetic polypeptide
KATKLVLGAVILGSTLLAGCSSNAKIDQGINPYVGFEMGYDWLGRMPYKGSVENGAYKAQGVQLTAKLGYPITDDLDIYTRLGGMVWRADTKSNVYGKNHDTGVSPVFAGGVEYAITPEIATRLEYQWTNNIGDAHTIGTRPDNGIPG

SEQ ID NO: 992 - protein, 658 aa, Artificial Sequence
  Description of Artificial Sequence: Synthetic polypeptide
ITHGCYTRTRHKHKLKKTLIMLSAGLGLFFYVNQNSFANGENYFKLGSDSKLLTHDSYQNRLFYTLKTGETVADLSKSQDINLSTIWSLNKHLYSSESEMMKAAPGQQIILPLKKLPFEYSALPLLGSAPLVAAGGVAGHTNKLTKMSPDVTKSNMTDDKALNYAAQQAASLGSQLQSRSLNGDYAKDTALGIAGNQASSQLQAWLQHYGTAEVNLQSGNNFDGSSLDFLLPFYDSEKMLAFGQVGARYIDSRFTANLGAGQRFFLPANMLGYNVFIDQDFSGDNTRLGIGGEYWRDYFKSSVNGYFRMSGWHESYNKKDYDERPANGFDIRFNGYLPSYPALGAKLIYEQYYGDNVALFNSDKLQSNPGAATVGVNYTPIPLVTMGIDYRHGTGNENDLLYSMQFRYQFDKSWSQQIEPQYVNELRTLSGSRYDLVQRNNNIILEYKKQDILSLNIPHDINGTEHSTQKIQLIVKSKYGLDRIVWDDSALRSQGGQIQHSGSQSAQDYQAILPAYVQGGSNIYKVTARAYYRNGNSSNNVQLTITVLSNGQVVDQVGVTDFTADKTSAKADNADTITYTATVKKNGVAQANVPVSFNIVSGTATLGANSAKTDANGKATVTLKSSTPGQVVVSAKTAEMTSALNASAVIFFDQTKAS

SEQ ID NO: 993 - DNA, 5121 bp, Artificial Sequence
  Description of Artificial Sequence: Synthetic polynucleotide
agcgcccaatacgcaaaccgcctctccccgcgcgttggccgattcattaatgcagctggcacgacaggtttcccgactggaaagcgggcagtgagcgcaacgcaattaatgtgagttagctcactcattaggcaccccaggctttacactttatgcttccggctcgtatgttgtgtggaattgtgagcggataacaatttcacacaggaaacagctatgaccatgattacgccaagctatttaggtgacactatagaatactcaagctatgcatcaagcttggtaccgagctcggatccactagtaacggccgccagtgtgctggaattcgcccttttaagacccactttcacatttaagttgtttttctaatccgcagatgatcaattcaaggccgaataagaaggctggctctgcaccttggtgatcaaataattcgatagcttgtcgtaataatggcggcatactatcagtagtaggtgtttccctttcttctttagcgacttgatgctcttgatcttccaatacgcaacctaaagtaaaatgccccacagcgctgagtgcatataatgcattctctagtgaaaaaccttgttggcataaaaaggctaattgattttcgagagtttcatactgtttttctgtaggccgtgtacctaaatgtacttttgctccatcgcgatgacttagtaaagcacatctaaaacttttagcgttattacgtaaaaaatcttgccagctttccccttctaaagggcaaaagtgagtatggtgcctatctaacatctcaatggctaaggcgtcgagcaaagcccgcttattttttacatgccaatacaatgtaggctgctctacacctagcttctgggcgagtttacgggttgttaaaccttcgattccgacctcattaagcagctctaatgcgctgttaatcactttacttttatctaatctagacatcattaattcctaatttttgttgacactctatcattgatagagttattttaccactccctatcagtgatagagaaaagtgaaaggaggtaaattcatatgactagtcaattgggtggtagcgaggtccagctggtggaatctggcggagacttagtaaagccgggaggttcgttgaagttgagttgcgctgctagtgggtttacgtttagcggctatggtatgtcatgggtccgccaaacacccgataaacgtttagagtgggtcgccacgattacgagtggaggcacctacacctattatccggattctgtcaaaggccgctttactatttctcgtgataatgcaaagaacaccttatatttacagatcgactccttgaagtctgaggataccgcaatttatttctgtgcccgttcgttagccggtaatgctatggattattgggggcaaggcacatctgtcacagtctcatccggaggaggcggatcaggtggtggcggttctggcggcggcggatctgacattgtgatgacacaatcacctgcgacactttcggttactccaggagaccgcgttagcttgtcgtgtcgcgcctctcaaaccatcagtgactacttacattggtaccaacagaaatcccatgaatcgccacgcttacttattaagtttgcgtcccaatcaattagtggtattccgtcgcgctttagtggtagcggttctggttctgatttcacattgtcaatcaacagcgtggagccggaggatgttggtgtttactactgccaaaacggtcacggctttccacgtacattcggagggggaacgaagttggaaattaaaggcagcggcgagctcggtggcagtggtaagcctatccctaaccctctcctcggcctcgattctacgggatccggtcatcatcaccatcaccattgagcatgctaatcagccgtggaattcgaattcggtctcaggaggaagggcgaattctgcagatatccatcacactggcggccgctcgagcatgcatctagagggcccaattcgccctatagtgagtcgtattacaattcactggccgtcgttttacaacgtcgtgactgggaaaaccctggcgttacccaacttaatcgccttgcagcacatccccctttcgccagctggcgtaatagcgaagaggcccgcaccgatcgcccttcccaacagttgcgcagcctatacgtacggcagtttaaggtttacacctataaaagagagagccgttatcgtctgtttgtggatgtacagagtgatattattgacacgccggggcgacggatggtgatccccctggccagtgcacgtctgctgtcagataaagtctcccgtgaactttacccggtggtgcatatcggggatgaaagctggcgcatgatgaccaccgatatggccagtgtgccggtctccgttatcggggaagaagtggctgatctcagccaccgcgaaaatgacatcaaaaacgccattaacctgatgttctggggaatataaatgtcaggcatgagattatcaaaaaggatcttcacctagatccttttcacgtagaaagccagtccgcagaaacggtgctgaccccggatgaatgtcagctactgggctatctggacaagggaaaacgcaagcgcaaagagaaagcaggtagcttgcagtgggcttacatggcgatagctagactgggcggttttatggacagcaagcgaaccggaattgccagctggggcgccctctggtaaggttgggaagccctgcaaagtaaactggatggctttctcgccgccaaggatctgatggcgcaggggatcaagctctgatcaagagacaggatgaggatcgtttcgcatgattgaacaagatggattgcacgcaggttctccggccgcttgggtggagaggctattcggctatgactgggcacaacagacaatcggctgctctgatgccgccgtgttccggctgtcagcgcaggggcgcccggttctttttgtcaagaccgacctgtccggtgccctgaatgaactgcaagacgaggcagcgcggctatcgtggctggccacgacgggcgttccttgcgcagctgtgctcgacgttgtcactgaagcgggaagggactggctgctattgggcgaagtgccggggcaggatctcctgtcatctcaccttgctcctgccgagaaagtatccatcatggctgatgcaatgcggcggctgcatacgcttgatccggctacctgcccattcgaccaccaagcgaaacatcgcatcgagcgagcacgtactcggatggaagccggtcttgtcgatcaggatgatctggacgaagagcatcaggggctcgcgccagccgaactgttcgccaggctcaaggcgagcatgcccgacggcgaggatctcgtcgtgacccatggcgatgcctgcttgccgaatatcatggtggaaaatggccgcttttctggattcatcgactgtggccggctgggtgtggcggaccgctatcaggacatagcgttggctacccgtgatattgctgaagagcttggcggcgaatgggctgaccgcttcctcgtgctttacggtatcgccgctcccgattcgcagcgcatcgccttctatcgccttcttgacgagttcttctgaattattaacgcttacaatttcctgatgcggtattttctccttacgcatctgtgcggtatttcacaccgcatacaggtggcacttttcggggaaatgtgcgcggaacccctatttgtttatttttctaaatacattcaaatatgtatccgctcatgagacaataaccctgataaatgcttcaataatagcacgtgaggagggccaccatggccaagttgaccagtgccgttccggtgctcaccgcgcgcgacgtcgccggagcggtcgagttctggaccgaccggctcgggttctcccgggacttcgtggaggacgacttcgccggtgtggtccgggacgacgtgaccctgttcatcagcgcggtccaggaccaggtggtgccggacaacaccctggcctgggtgtgggtgcgcggcctggacgagctgtacgccgagtggtcggaggtcgtgtccacgaacttccgggacgcctccgggccggccatgaccgagatcggcgagcagccgtgggggcgggagttcgccctgcgcgacccggccggcaactgcgtgcacttcgtggccgaggagcaggactgacacgtgctaaaacttcatttttaatttaaaaggatctaggtgaagatcctttttgataatctcatgaccaaaatcccttaacgtgagttttcgttccactgagcgtcagaccccgtagaaaagatcaaaggatcttcttgagatcctttttttctgcgcgtaatctgctgcttgcaaacaaaaaaaccaccgctaccagcggtggtttgtttgccggatcaagagctaccaactctttttccgaaggtaactggcttcagcagagcgcagataccaaatactgtccttctagtgtagccgtagttaggccaccacttcaagaactctgtagcaccgcctacatacctcgctctgctaatcctgttaccagtggctgctgccagtggcgataagtcgtgtcttaccgggttggactcaagacgatagttaccggataaggcgcagcggtcgggctgaacggggggttcgtgcacacagcccagcttggagcgaacgacctacaccgaactgagatacctacagcgtgagctatgagaaagcgccacgcttcccgaagggagaaaggcggacaggtatccggtaagcggcagggtcggaacaggagagcgcacgagggagcttccagggggaaacgcctggtatctttatagtcctgtcgggtttcgccacctctgacttgagcgtcgatttttgtgatgctcgtcaggggggcggagcctatggaaaaacgccagcaacgcggcctttttacggttcctgggcttttgctggccttttgctcacatgttctttcctgcgttatcccctgattctgtggataaccgtattaccgcctttgagtgagctgataccgctcgccgcagccgaacgaccgagcgcagcgagtcagtgagcgaggaagcggaag

SEQ ID NO: 994 - protein, 240 aa, Artificial Sequence
  Description of Artificial Sequence: Synthetic polypeptide
EVQLVESGGDLVKPGGSLKLSCAASGFTFSGYGMSWVRQTPDKRLEWVATITSGGTYTYYPDSVKGRFTISRDNAKNTLYLQIDSLKSEDTAIYFCARSLAGNAMDYWGQGTSVTVSSGGGGSGGGGSGGGGSDIVMTQSPATLSVTPGDRVSLSCRASQTISDYLHWYQQKSHESPRLLIKFASQSISGIPSRFSGSGSGSDFTLSINSVEPEDVGVYYCQNGHGFPRTFGGGTKLEIK

SEQ ID NO: 995 - DNA, 5133 bp, Artificial Sequence
  Description of Artificial Sequence: Synthetic polynucleotide
agcgcccaatacgcaaaccgcctctccccgcgcgttggccgattcattaatgcagctggcacgacaggtttcccgactggaaagcgggcagtgagcgcaacgcaattaatgtgagttagctcactcattaggcaccccaggctttacactttatgcttccggctcgtatgttgtgtggaattgtgagcggataacaatttcacacaggaaacagctatgaccatgattacgccaagctatttaggtgacactatagaatactcaagctatgcatcaagcttggtaccgagctcggatccactagtaacggccgccagtgtgctggaattcgcccttttaagacccactttcacatttaagttgtttttctaatccgcagatgatcaattcaaggccgaataagaaggctggctctgcaccttggtgatcaaataattcgatagcttgtcgtaataatggcggcatactatcagtagtaggtgtttccctttcttctttagcgacttgatgctcttgatcttccaatacgcaacctaaagtaaaatgccccacagcgctgagtgcatataatgcattctctagtgaaaaaccttgttggcataaaaaggctaattgattttcgagagtttcatactgtttttctgtaggccgtgtacctaaatgtacttttgctccatcgcgatgacttagtaaagcacatctaaaacttttagcgttattacgtaaaaaatcttgccagctttccccttctaaagggcaaaagtgagtatggtgcctatctaacatctcaatggctaaggcgtcgagcaaagcccgcttattttttacatgccaatacaatgtaggctgctctacacctagcttctgggcgagtttacgggttgttaaaccttcgattccgacctcattaagcagctctaatgcgctgttaatcactttacttttatctaatctagacatcattaattcctaatttttgttgacactctatcattgatagagttattttaccactccctatcagtgatagagaaaagtgaaaggaggtaaattcatatgactagtcaattgggtggtagccaggtgcagcttgtgcagagtggcgctgaagtgaagaaaccgggcgcatcagtgaaagtgagctgcaaagcaagcggttataccttcacgaactataacatgcactgggtacgtcaagcacccggccagcgtcttgagtggatgggcaccatttatcctggaaacgacgacacatcctacaaccaaaagtttaaggaccgcgtaactatcactgctgacacttcagcttccacagcatatatggagcttagtagcctgcgtagtgaagacacagcggtctactactgcgcacgtggagggtatcgtgcgatggactactgggggcagggcacacttgtgactgtttcatctggcggtggaggctctggaggggggggtagcggggggggcggtagcgatatcgtaatgactcagtccccactttccttacccgtcacaccgggcgaacctgcatctattagctgtcgttcgtcgcaaagcattgtttactcgaatgggaatacgtacttggggtggtatcttcaaaaaccagggcagtcccctcagttgttgatctacaaggtgtccaaccgctttagtggggtgcctgatcgtttctctggcagtggtagtggtaccgacttcacgcttaaaatttcccgtgtcgaagcagaagacgttggcgtatattactgcttccaaggcagtcatgtgccatacacgttcgggcaaggcaccaaacttgagatcaaaggcagcggcgagctcggtggcagtggtaagcctatccctaaccctctcctcggcctcgattctacgggatccggtcatcatcaccatcaccattgagcatgctaatcagccgtggaattcgaattcggtctcaggaggaagggcgaattctgcagatatccatcacactggcggccgctcgagcatgcatctagagggcccaattcgccctatagtgagtcgtattacaattcactggccgtcgttttacaacgtcgtgactgggaaaaccctggcgttacccaacttaatcgccttgcagcacatccccctttcgccagctggcgtaatagcgaagaggcccgcaccgatcgcccttcccaacagttgcgcagcctatacgtacggcagtttaaggtttacacctataaaagagagagccgttatcgtctgtttgtggatgtacagagtgatattattgacacgccggggcgacggatggtgatccccctggccagtgcacgtctgctgtcagataaagtctcccgtgaactttacccggtggtgcatatcggggatgaaagctggcgcatgatgaccaccgatatggccagtgtgccggtctccgttatcggggaagaagtggctgatctcagccaccgcgaaaatgacatcaaaaacgccattaacctgatgttctggggaatataaatgtcaggcatgagattatcaaaaaggatcttcacctagatccttttcacgtagaaagccagtccgcagaaacggtgctgaccccggatgaatgtcagctactgggctatctggacaagggaaaacgcaagcgcaaagagaaagcaggtagcttgcagtgggcttacatggcgatagctagactgggcggttttatggacagcaagcgaaccggaattgccagctggggcgccctctggtaaggttgggaagccctgcaaagtaaactggatggctttctcgccgccaaggatctgatggcgcaggggatcaagctctgatcaagagacaggatgaggatcgtttcgcatgattgaacaagatggattgcacgcaggttctccggccgcttgggtggagaggctattcggctatgactgggcacaacagacaatcggctgctctgatgccgccgtgttccggctgtcagcgcaggggcgcccggttctttttgtcaagaccgacctgtccggtgccctgaatgaactgcaagacgaggcagcgcggctatcgtggctggccacgacgggcgttccttgcgcagctgtgctcgacgttgtcactgaagcgggaagggactggctgctattgggcgaagtgccggggcaggatctcctgtcatctcaccttgctcctgccgagaaagtatccatcatggctgatgcaatgcggcggctgcatacgcttgatccggctacctgcccattcgaccaccaagcgaaacatcgcatcgagcgagcacgtactcggatggaagccggtcttgtcgatcaggatgatctggacgaagagcatcaggggctcgcgccagccgaactgttcgccaggctcaaggcgagcatgcccgacggcgaggatctcgtcgtgacccatggcgatgcctgcttgccgaatatcatggtggaaaatggccgcttttctggattcatcgactgtggccggctgggtgtggcggaccgctatcaggacatagcgttggctacccgtgatattgctgaagagcttggcggcgaatgggctgaccgcttcctcgtgctttacggtatcgccgctcccgattcgcagcgcatcgccttctatcgccttcttgacgagttcttctgaattattaacgcttacaatttcctgatgcggtattttctccttacgcatctgtgcggtatttcacaccgcatacaggtggcacttttcggggaaatgtgcgcggaacccctatttgtttatttttctaaatacattcaaatatgtatccgctcatgagacaataaccctgataaatgcttcaataatagcacgtgaggagggccaccatggccaagttgaccagtgccgttccggtgctcaccgcgcgcgacgtcgccggagcggtcgagttctggaccgaccggctcgggttctcccgggacttcgtggaggacgacttcgccggtgtggtccgggacgacgtgaccctgttcatcagcgcggtccaggaccaggtggtgccggacaacaccctggcctgggtgtgggtgcgcggcctggacgagctgtacgccgagtggtcggaggtcgtgtccacgaacttccgggacgcctccgggccggccatgaccgagatcggcgagcagccgtgggggcgggagttcgccctgcgcgacccggccggcaactgcgtgcacttcgtggccgaggagcaggactgacacgtgctaaaacttcatttttaatttaaaaggatctaggtgaagatcctttttgataatctcatgaccaaaatcccttaacgtgagttttcgttccactgagcgtcagaccccgtagaaaagatcaaaggatcttcttgagatcctttttttctgcgcgtaatctgctgcttgcaaacaaaaaaaccaccgctaccagcggtggtttgtttgccggatcaagagctaccaactctttttccgaaggtaactggcttcagcagagcgcagataccaaatactgtccttctagtgtagccgtagttaggccaccacttcaagaactctgtagcaccgcctacatacctcgctctgctaatcctgttaccagtggctgctgccagtggcgataagtcgtgtcttaccgggttggactcaagacgatagttaccggataaggcgcagcggtcgggctgaacggggggttcgtgcacacagcccagcttggagcgaacgacctacaccgaactgagatacctacagcgtgagctatgagaaagcgccacgcttcccgaagggagaaaggcggacaggtatccggtaagcggcagggtcggaacaggagagcgcacgagggagcttccagggggaaacgcctggtatctttatagtcctgtcgggtttcgccacctctgacttgagcgtcgatttttgtgatgctcgtcaggggggcggagcctatggaaaaacgccagcaacgcggcctttttacggttcctgggcttttgctggccttttgctcacatgttctttcctgcgttatcccctgattctgtggataaccgtattaccgcctttgagtgagctgataccgctcgccgcagccgaacgaccgagcgcagcgagtcagtgagcgaggaagcggaag

SEQ ID NO: 996 - protein, 244 aa, Artificial Sequence
  Description of Artificial Sequence: Synthetic polypeptide
QVQLVQSGAEVKKPGASVKVSCKASGYTFTNYNMHWVRQAPGQRLEWMGTIYPGNDDTSYNQKFKDRVTITADTSASTAYMELSSLRSEDTAVYYCARGGYRAMDYWGQGTLVTVSSGGGGSGGGGSGGGGSDIVMTQSPLSLPVTPGEPASISCRSSQSIVYSNGNTYLGWYLQKPGQSPQLLIYKVSNRFSGVPDRFSGSGSGTDFTLKISRVEAEDVGVYYCFQGSHVPYTFGQGTKLEIK

SEQ ID NO: 997-1050 - skipped (54 entries)

SEQ ID NO: 1051 - protein, 26 aa, Artificial Sequence
  Description of Artificial Sequence: Synthetic peptide
SSADDAKKDAAKKDDAKKDDAKKDAS

SEQ ID NO: 1052 - protein, 15 aa, Artificial Sequence
  Description of Artificial Sequence: Synthetic peptide
GGGGSGGGGSGGGGS

SEQ ID NO: 1053 - protein, 30 aa, Artificial Sequence
  Description of Artificial Sequence: Synthetic polypeptide
  MISC_FEATURE (1)..(30): This sequence may encompass 1-6 "Gly Gly Gly Gly Ser" repeating units
GGGGSGGGGSGGGGSGGGGSGGGGSGGGGS

SEQ ID NO: 1054 - protein, 9 aa, Artificial Sequence
  Description of Artificial Sequence: Synthetic peptide
GGGGSGGGS

SEQ ID NO: 1055 - protein, 7 aa, Artificial Sequence
  Description of Artificial Sequence: Synthetic peptide
GGGSGGG

SEQ ID NO: 1056 - protein, 8 aa, Artificial Sequence
  Description of Artificial Sequence: Synthetic 8xHis tag
HHHHHHHH

SEQ ID NO: 1057 - protein, 5 aa, Artificial Sequence
  Description of Artificial Sequence: Synthetic peptide
  MOD_RES (4)..(4): Any amino acid except Pro
VPGXG

SEQ ID NO: 1058 - protein, 5 aa, Artificial Sequence
  Description of Artificial Sequence: Synthetic peptide
GGGGS

SEQ ID NO: 1059 - protein, 18 aa, Artificial Sequence
  Description of Artificial Sequence: Synthetic peptide
KESGSVSSEQLAQFRSLD

SEQ ID NO: 1060 - protein, 14 aa, Artificial Sequence
  Description of Artificial Sequence: Synthetic peptide
EGKSSGSGSESKST

SEQ ID NO: 1061 - protein, 8 aa, Artificial Sequence
  Description of Artificial Sequence: Synthetic peptide
GGGGGGGG

SEQ ID NO: 1062 - protein, 12 aa, Artificial Sequence
  Description of Artificial Sequence: Synthetic peptide
GSAGSAAGSGEF

SEQ ID NO: 1063 - protein, 15 aa, Artificial Sequence
  Description of Artificial Sequence: Synthetic peptide
GGGGSGGGGSGGGGS

SEQ ID NO: 1064 - protein, 6 aa, Artificial Sequence
  Description of Artificial Sequence: Synthetic peptide
GGGGGG

SEQ ID NO: 1065 - protein, 15 aa, Artificial Sequence
  Description of Artificial Sequence: Synthetic peptide
EAAAKEAAAKEAAAK

SEQ ID NO: 1066 - protein, 15 aa, Artificial Sequence
  Description of Artificial Sequence: Synthetic peptide
  MISC_FEATURE (1)..(15): This sequence may encompass 1-3 "Glu Ala Ala Ala Lys" repeating units
EAAAKEAAAKEAAAK

SEQ ID NO: 1067 - protein, 46 aa, Artificial Sequence
  Description of Artificial Sequence: Synthetic polypeptide
AEAAAKEAAAKEAAAKEAAAKALEAEAAAKEAAAKEAAAKEAAAKA

SEQ ID NO: 1068 - protein, 5 aa, Artificial Sequence
  Description of Artificial Sequence: Synthetic peptide
PAPAP

SEQ ID NO: 1069 - protein, 12 aa, Artificial Sequence
  Description of Artificial Sequence: Synthetic peptide
AEAAAKEAAAKA

SEQ ID NO: 1070 - protein, 20 aa, Artificial Sequence
  Description of Artificial Sequence: Synthetic peptide
  MISC_FEATURE (1)..(20): This sequence may encompass 1, 2, or 4 "Gly Gly Gly Gly Ser" repeating units
GGGGSGGGGSGGGGSGGGGS

SEQ ID NO: 1071 - protein, 34 aa, Artificial Sequence
  Description of Artificial Sequence: Synthetic polypeptide
  MISC_FEATURE (1)..(34): This sequence may encompass 5-17 "Ala Pro" repeating units
APAPAPAPAPAPAPAPAPAPAPAPAPAPAPAPAP

SEQ ID NO: 1072 - protein, 17 aa, Artificial Sequence
  Description of Artificial Sequence: Synthetic peptide
VSQTSKLTRAETVFPDV

SEQ ID NO: 1073 - protein, 6 aa, Artificial Sequence
  Description of Artificial Sequence: Synthetic peptide
PLGLWA

SEQ ID NO: 1074 - protein, 6 aa, Artificial Sequence
  Description of Artificial Sequence: Synthetic peptide
RVLAEA

SEQ ID NO: 1075 - protein, 10 aa, Artificial Sequence
  Description of Artificial Sequence: Synthetic peptide
EDVVCCSMSY

SEQ ID NO: 1076 - protein, 9 aa, Artificial Sequence
  Description of Artificial Sequence: Synthetic peptide
GGIEGRGSC

SEQ ID NO: 1077 - protein, 10 aa, Artificial Sequence
  Description of Artificial Sequence: Synthetic peptide
TRHRQPRGWE

SEQ ID NO: 1078 - protein, 10 aa, Artificial Sequence
  Description of Artificial Sequence: Synthetic peptide
AGNRVRRSVG

SEQ ID NO: 1079 - protein, 9 aa, Artificial Sequence
  Description of Artificial Sequence: Synthetic peptide
RRRRRRRRR

SEQ ID NO: 1080 - protein, 4 aa, Artificial Sequence
  Description of Artificial Sequence: Synthetic peptide
GFLG

SEQ ID NO: 1081 - protein, 28 aa, Artificial Sequence
  Description of Artificial Sequence: Synthetic peptide
  MISC_FEATURE (1)..(28): This sequence may encompass 1-4 "Gly Gly Gly Ser Gly Gly Gly" repeating units
  See specification as filed for detailed description of substitutions and preferred embodiments
GGGSGGGGGGSGGGGGGSGGGGGGSGGG

SEQ ID NO: 1082 - protein, 20 aa, Artificial Sequence
  Description of Artificial Sequence: Synthetic peptide
  MISC_FEATURE (1)..(20): This sequence may encompass 1-4 "Gly Gly Ser Gly Gly" repeating units
  See specification as filed for detailed description of substitutions and preferred embodiments
GGSGGGGSGGGGSGGGGSGG

SEQ ID NO: 1083 - protein, 12 aa, Artificial Sequence
  Description of Artificial Sequence: Synthetic peptide
  MISC_FEATURE (1)..(12): This sequence may encompass 1-4 "Gly Ser Gly" repeating units
  See specification as filed for detailed description of substitutions and preferred embodiments
GSGGSGGSGGSG

SEQ ID NO: 1084 - protein, 24 aa, Artificial Sequence
  Description of Artificial Sequence: Synthetic peptide
  MISC_FEATURE (1)..(24): This sequence may encompass 1-4 "Gly Gly Gly Ser Gly Gly" repeating units
  See specification as filed for detailed description of substitutions and preferred embodiments
GGGSGGGGGSGGGGGSGGGGGSGG

SEQ ID NO: 1085 - DNA, 18 bp, Artificial Sequence
  Description of Artificial Sequence: Synthetic oligonucleotide
ttgttgayryrtcaacwa

SEQ ID NO: 1086 - DNA, 15 bp, Artificial Sequence
  Description of Artificial Sequence: Synthetic oligonucleotide
  modified_base (8)..(8): a, c, t, g, unknown or other
ttataatnattataa

SEQ ID NO: 1087 - DNA, 24 bp, Artificial Sequence
  Description of Artificial Sequence: Synthetic oligonucleotide
ggaaaatttttttaaaaaaaaaac

SEQ ID NO: 1088 - protein, 52 aa, Artificial Sequence; identical to SEQ ID NO: 395
  Description of Artificial Sequence: Synthetic polypeptide

SEQ ID NO: 1089 - protein, 40 aa, Artificial Sequence; identical to SEQ ID NO: 396
  Description of Artificial Sequence: Synthetic polypeptide

SEQ ID NO: 1090 - protein, 33 aa, Artificial Sequence; identical to SEQ ID NO: 397
  Description of Artificial Sequence: Synthetic polypeptide

SEQ ID NO: 1091 - protein, 53 aa, Artificial Sequence; identical to SEQ ID NO: 398
  Description of Artificial Sequence: Synthetic polypeptide

SEQ ID NO: 1092 - protein, 19 aa, Artificial Sequence
  Description of Artificial Sequence: Synthetic peptide
MKKIWLALAGLVLAFSASA

SEQ ID NO: 1093 - protein, 22 aa, Artificial Sequence
  Description of Artificial Sequence: Synthetic peptide
MQLRKPATAILALALSAGLAQA

SEQ ID NO: 1094 - protein, 26 aa, Artificial Sequence
  Description of Artificial Sequence: Synthetic peptide
MKIKTGARILALSALTTMMFSASALA

SEQ ID NO: 1095 - protein, 26 aa, Artificial Sequence
  Description of Artificial Sequence: Synthetic peptide
MTNITKRSLVAAGVLAALMAGNVALA

SEQ ID NO: 1096 - protein, 22 aa, Artificial Sequence
  Description of Artificial Sequence: Synthetic peptide
MKYLLPTAAAGLLLLAAQPAMA

SEQ ID NO: 1097 - protein, 21 aa, Artificial Sequence
  Description of Artificial Sequence: Synthetic peptide
MKQSTIALALLPLLFTPVTKA

SEQ ID NO: 1098 - protein, 24 aa, Artificial Sequence
  Description of Artificial Sequence: Synthetic peptide
MFKSTLAAMAAVFALSALSPAAMA

SEQ ID NO: 1099 - DNA, 159 bp, Artificial Sequence
  Description of Artificial Sequence: Synthetic polynucleotide
atgaacaagattttcaaggttatctggaaccccgcgacaggcagctacactgtggcctccgaaaccgctaagtcgcgcggcaagaagtcaggacgttcaaagctgcttatttctgctttagtagccggaggattactttctagctttggagcctcggca

SEQ ID NO: 1100 - DNA, 57 bp, Artificial Sequence
  Description of Artificial Sequence: Synthetic oligonucleotide
atgaaaaaaatctggctggcattagcaggcttagtcctggcctttagtgcctcggca

SEQ ID NO: 1101 - DNA, 66 bp, Artificial Sequence
  Description of Artificial Sequence: Synthetic oligonucleotide
atgcagttgcgcaagcctgccacggcaattttagcattagctctttctgcgggcttggcccaggca

SEQ ID NO: 1102 - DNA, 120 bp, Artificial Sequence
  Description of Artificial Sequence: Synthetic polynucleotide
atgttctggcgcgacatgacactgagcgtttggcgtaaaaaaacaacgggactgaaaaccaaaaagcgtttgttagcccttgtcctggcggcagccctgtgctcgtccccggtatgggca

SEQ ID NO: 1103 - DNA, 99 bp, Artificial Sequence
  Description of Artificial Sequence: Synthetic oligonucleotide
atgggatacaagatgaacatttcatcacttcgcaaagcttttatcttcatgggtgccgttgctgctctgtcactggtcaatgctcaatcggccctggca

SEQ ID NO: 1104 - DNA, 78 bp, Artificial Sequence
  Description of Artificial Sequence: Synthetic oligonucleotide
atgaagattaaaacaggcgctcgtattttggccctgtctgcgcttacgactatgatgtttagtgcctcggccctggca

SEQ ID NO: 1105 - DNA, 78 bp, Artificial Sequence
  Description of Artificial Sequence: Synthetic oligonucleotide
atgacgaatatcactaaacgtagccttgtggccgcgggggtcttggctgcattgatggctggcaatgttgctctggca

SEQ ID NO: 1106 - DNA, 66 bp, Artificial Sequence
  Description of Artificial Sequence: Synthetic oligonucleotide
atgaaatatctgttgcccacggctgccgcgggtctgctgctgctggcagcgcaaccggctatggca

SEQ ID NO: 1107 - DNA, 63 bp, Artificial Sequence
  Description of Artificial Sequence: Synthetic oligonucleotide
atgaagcaaagtacgatcgcccttgcgctgttgccccttcttttcacgcccgtcaccaaggca

SEQ ID NO: 1108 - DNA, 72 bp, Artificial Sequence
  Description of Artificial Sequence: Synthetic oligonucleotide
atgtttaagtctacacttgcagccatggccgcagtcttcgcactgtcagccttgagtcctgctgcaatggca

SEQ ID NO: 1109 - protein, 21 aa, Artificial Sequence
  Description of Artificial Sequence: Synthetic peptide
MKQALRVAFGFLILWASVLHA

SEQ ID NO: 1110 - protein, 18 aa, Artificial Sequence
  Description of Artificial Sequence: Synthetic peptide
MRVLLFLLLSLFMLPAFS

SEQ ID NO: 1111 - protein, 21 aa, Artificial Sequence
  Description of Artificial Sequence: Synthetic peptide
MKKTAIAIAVALAGFATVAQA

SEQ ID NO: 1112 - DNA, 57 bp, Artificial Sequence
  Description of Artificial Sequence: Synthetic oligonucleotide
atgaagaaaatttggctggcacttgccggtttggtattagcgttttccgcctcggca

SEQ ID NO: 1113 - DNA, 63 bp, Artificial Sequence
  Description of Artificial Sequence: Synthetic oligonucleotide
atgaagcaggcgcttcgcgttgcgtttgggttccttatcctgtgggcatccgtacttcacgcc

SEQ ID NO: 1114 - DNA, 54 bp, Artificial Sequence
  Description of Artificial Sequence: Synthetic oligonucleotide
atgcgcgtactgttattccttctgttgtctctttttatgttgcccgctttcagt

SEQ ID NO: 1115 - DNA, 63 bp, Artificial Sequence
  Description of Artificial Sequence: Synthetic oligonucleotide
atgaagaagactgccatcgctattgccgtcgcccttgcgggtttcgcaaccgtggcgcaagca

SEQ ID NO: 1116 - DNA, 66 bp, Artificial Sequence
  Description of Artificial Sequence: Synthetic oligonucleotide
atgaaatatctgcttccaacggctgctgctggcctgttgcttcttgccgcccagcctgcgatggct

SEQ ID NO: 1117 - DNA, 99 bp, Artificial Sequence; identical to SEQ ID NO: 491
  Description of Artificial Sequence: Synthetic oligonucleotide

SEQ ID NO: 1118 - DNA, 57 bp, Artificial Sequence
  Description of Artificial Sequence: Synthetic oligonucleotide
atgaaaaagatttggctggctcttgccggtttagtcctggcattcagcgcaagcgcg

SEQ ID NO: 1119 - DNA, 63 bp, Artificial Sequence
  Description of Artificial Sequence: Synthetic oligonucleotide
atgaaacagagcacaatcgctttagccttgctgcctcttcttttcacgcctgtcacgaaggca

SEQ ID NO: 1120 - DNA, 63 bp, Artificial Sequence
  Description of Artificial Sequence: Synthetic oligonucleotide
atgaagcaggctctgcgcgtggcatttgggttcctgatcttatgggcgtccgtcttacacgca

SEQ ID NO: 1121 - DNA, 78 bp, Artificial Sequence
  Description of Artificial Sequence: Synthetic oligonucleotide
atgaaaatcaagacgggggcacgcattcttgccttgagcgccttgacaacgatgatgttcagtgcaagtgcattagcg

SEQ ID NO: 1122 - DNA, 69 bp, Artificial Sequence
  Description of Artificial Sequence: Synthetic oligonucleotide
atgaataagaaagtcttgacattgtcggcggtcatggcctcgatgttgttcggggcagcagcccacgca

SEQ ID NO: 1123 - DNA, 66 bp, Artificial Sequence
  Description of Artificial Sequence: Synthetic oligonucleotide
atgatgaagcgtaacatcttagccgttattgtccccgcattgcttgtggccgggacggctaacgca

SEQ ID NO: 1124 - DNA, 54 bp, Artificial Sequence
  Description of Artificial Sequence: Synthetic oligonucleotide
atgcgcgtgttattgttcttgctgctgagcttgtttatgttaccagctttcagt

SEQ ID NO: 1125 - DNA, 75 bp, Artificial Sequence
  Description of Artificial Sequence: Synthetic oligonucleotide
atgatgattaccttacgcaagttgccccttgcggtagccgttgctgctggtgtgatgtccgcgcaagcaatggct

SEQ ID NO: 1126 - DNA, 66 bp, Artificial Sequence
  Description of Artificial Sequence: Synthetic oligonucleotide
atgaaatatcttcttccaacggctgctgctggtttattgcttcttgccgcccagcctgcgatggct

SEQ ID NO: 1127 - protein, 23 aa, Artificial Sequence
  Description of Artificial Sequence: Synthetic peptide
MNKKVLTLSAVMASMLFGAAAHA

SEQ ID NO: 1128 - protein, 22 aa, Artificial Sequence
  Description of Artificial Sequence: Synthetic peptide
MMKRNILAVIVPALLVAGTANA

SEQ ID NO: 1129 - protein, 25 aa, Artificial Sequence
  Description of Artificial Sequence: Synthetic peptide
MMITLRKLPLAVAVAAGVMSAQAMA

SEQ ID NO: 1130 - protein, 8 aa, Artificial Sequence
  Description of Artificial Sequence: Synthetic peptide
AGYGSTLT

SEQ ID NO: 1131 - protein, 197 aa, Artificial Sequence
  Description of Artificial Sequence: Synthetic polypeptide
RNLPVATPDPGMFPCLHHSQNLLRAVSNMLQKARQTLEFYPCTSEEIDHEDITKDKTSTVEACLPLELTKNESCLNSRETSFITNGSCLASRKTSFMMALCLSSIYEDLKMYQVEFKTMNAKLLMDPKRQIFLDQNMLAVIDELMQALNFNSETVPQKSSLEEPDFYKTKIKLCILLHAFRIRAVTIDRVMSYLNAS

SEQ ID NO: 1132 - protein, 306 aa, Artificial Sequence
  Description of Artificial Sequence: Synthetic polypeptide
IWELKKDVYVVELDWYPDAPGEMVVLTCDTPEEDGITWTLDQSSEVLGSGKTLTIQVKEFGDAGQYTCHKGGEVLSHSLLLLHKKEDGIWSTDILKDQKEPKNKTFLRCEAKNYSGRFTCWWLTTISTDLTFSVKSSRGSSDPQGVTCGAATLSAERVRGDNKEYEYSVECQEDSACPAAEESLPIEVMVDAVHKLKYENYTSSFFIRDIIKPDPPKNLQLKPLKNSRQVEVSWEYPDTWSTPHSYFSLTFCVQVQGKSKREKKDRVFTDKTSATVICRKNASISVRAQDRYYSSSWSEWASVPCS

SEQ ID NO: 1133 - protein, 313 aa, Artificial Sequence
  Description of Artificial Sequence: Synthetic polypeptide
MWELEKDVYVVEVDWTPDAPGETVNLTCDTPEEDDITWTSDQRHGVIGSGKTLTITVKEFLDAGQYTCHKGGETLSHSHLLLHKKENGIWSTEILKNFKNKTFLKCEAPNYSGRFTCSWLVQRNMDLKFNIKSSSSSPDSRAVTCGMASLSAEKVTLDQRDYEKYSVSCQEDVTCPTAEETLPIELALEARQQNKYENYSTSFFIRDIIKPDPPKNLQMKPLKNSQVEVSWEYPDSWSTPHSYFSLKFFVRIQRKKEKMKETEEGCNQKGAFLVEKTSTEVQCKGGNVCVQAQDRYYNSSCSKWACVPCRVRS

SEQ ID NO: 1134 - protein, 114 aa, Homo sapiens
NWVNVISDLKKIEDLIQSMHIDATLYTESDVHPSCKVTAMKCFLLELQVISLESGDASIHDTVENLIILANNSLSSNGNVTESGCKECEELEEKNIKEFLQSFVHIVQMFINTS

SEQ ID NO: 1135 - protein, 127 aa, Homo sapiens [sequence omitted]

SEQ ID NO: 1136 - protein, 177 aa, Homo sapiens
GPQREEFPRDLSLISPLAQAVRSSSRTPSDKPVAHVVANPQAEGQLQWLNRRANALLANGVELRDNQLVVPSEGLYLIYSQVLFKGQGCPSTHVLLTHTISRIAVSYQTKVNLLSAIKSPCQRETPEGAEAKPWYEPIYLGGVFQLEKGDRLSAEINRPDYLDFAESGQVYFGIIAL

SEQ ID NO: 1137 - protein, 138 aa, Homo sapiens
QDPYVKEAENLKKYFNAGHSDVADNGTLFLGILKNWKEESDRKIMQSQIVSFYFKLFKNFKDDQSIQKSVETIKEDMNVKFFNSNKKKRDDFEKLTNYSVTDLNVQRKAIHELIQVMAELSPAAKTGKRKRSQMLFRG

SEQ ID NO: 1138 - protein, 73 aa, Homo sapiens
VPLSRTVRCTCISISNQPVNPRSLEKLEIIPASQFCPRVEIIATMKKKGEKRCLNPESKAIKNLLKAVSKERS

SEQ ID NO: 1139 - protein, 125 aa, Homo sapiens
MKKSGVLFLLGIILLVLIGVQGTPVVRKGRCSCISTNQGTIHLQSLKDLKQFAPSPSCEKIEIIATLKNGVQTCLNPDSADVKELIKKWEKQVSQKKKQKNGKKHQKKKVLKVRKSQRSRQKKTT

SEQ ID NO: 1140 - DNA, 594 bp, Artificial Sequence
  Description of Artificial Sequence: Synthetic polynucleotide
aggaacctgcctgtggcaacaccagaccctgggatgttcccttgcttacatcattcccagaacctgttgcgtgcggtgtctaacatgctgcagaaagccaggcagacgctggaattctacccatgcacttccgaagagatagatcatgaagacattacgaaagacaaaacctcaacggttgaagcatgcttacctctggaattgactaagaatgaatcgtgcttaaactcaagagagaccagtttcatcactaatggctcttgcttagcgtcgcgcaagaccagcttcatgatggcgctctgcctaagtagcatctacgaggacctcaaaatgtaccaagttgaatttaaaactatgaatgccaaacttctaatggacccaaaaagacagatatttttagatcagaatatgcttgcggttattgacgaactcatgcaggcattgaattttaattccgagacggtgccacaaaaaagttctttggaggagccggacttttacaagacaaaaatcaagctgtgcatacttcttcacgcattcagaatacgggccgttacgatcgatcgcgtcatgtcgtatcttaatgcgagctga

SEQ ID NO: 1141 - DNA, 924 bp, Artificial Sequence
  Description of Artificial Sequence: Synthetic polynucleotide
atctgggaactgaaaaaagatgtttatgtagttgaactggattggtacccggatgcacccggtgagatggtggttttgacctgcgacacgccggaagaagatggcataacgtggaccctggatcaaagctctgaagttctgggttcaggtaagacattgacgatccaagtaaaagaatttggcgacgcaggtcagtacacctgccacaaaggtggcgaagttctgtcgcactcactcctgctcctgcacaaaaaagaggatggcatctggagtactgatatcctaaaggatcaaaaagaacctaaaaacaaaacgttcttgcgctgtgaagcgaagaactatagtggtcgctttacgtgctggtggttgactaccatttccaccgatttgaccttttctgttaagagttcgcgcggctcgtcagatccgcagggcgttacttgcggtgcggcgacgctgtcagctgagagagttcgtggggacaacaaagagtacgaatatagtgtagaatgtcaagaggattcggcgtgcccggcagcagaggagtctctccccattgaagttatggtggacgcagtgcataaactgaaatatgagaattacacatcaagcttttttattcgcgatatcatcaaaccggatcctccaaaaaatctgcaactaaagcccctgaaaaattcgcgccaagttgaggtgagctgggaatatccggatacttggtcgacaccgcattcttatttctcactgaccttctgcgttcaggttcaaggtaaatcaaaacgagaaaaaaaggatcgcgtctttaccgacaaaacgtctgctactgtaatctgccgcaagaatgcgtcaatttctgtacgtgcgcaagatcgctactactctagtagttggtctgaatgggcttcagtgccatgctcctgatga

SEQ ID NO: 1142 - DNA, 594 bp, Artificial Sequence
  Description of Artificial Sequence: Synthetic polynucleotide
cgtaaccttccggtggccacgccagatccgggcatgttcccgtgcttacaccattcccagaatctgctgcgcgctgtgagtaatatgctgcagaaggcgagacaaactttggaattttacccgtgcacttcggaggagattgaccatgaggatatcacaaaagacaaaaccagtacagtggaagcctgcctgccccttgaactgactaaaaatgagagttgtttaaattcacgcgaaaccagcttcattactaacggaagctgcttagcatcgcggaaaaccagttttatgatggccctttgcctttcatctatttacgaggaccttaaaatgtatcaagttgaatttaagactatgaacgcgaaactgctaatggatcccaagcgacaaatctttcttgatcaaaatatgttggctgttattgatgaactgatgcaagccctgaattttaactcagaaaccgtacctcagaaatcgagtttagaagaacccgatttctacaaaactaaaatcaagttgtgtatccttttacatgccttccggattcgggccgtcactattgatcgcgtgatgtcgtacttgaatgcctcctaa

SEQ ID NO: 1143 - DNA, 942 bp, Artificial Sequence
  Description of Artificial Sequence: Synthetic polynucleotide
atgtgggaattggaaaaagacgtgtatgttgttgaagttgactggactccggacgcgcctggtgaaactgttaatctgacttgtgatacaccggaggaagatgatataacttggactagcgatcaacgacacggcgtaatcggctctggtaagactttgaccattactgtgaaggaattcttggatgcggggcaatatacgtgtcataaaggcggcgagacgctgtcacactctcacctgttgttacataaaaaagagaatggtatatggtctacggagatcttgaaaaactttaaaaacaaaacttttttgaagtgtgaggctccaaactattctggtcgctttacctgtagttggttggtgcaacgtaacatggatctcaaatttaacataaagtcgtcttcgtcttctcccgatagccgagcggttacctgtggcatggctagtttgtcggcggagaaggtgaccttggatcaacgtgattatgaaaaatatagcgtttcgtgccaagaggacgttacgtgccctaccgctgaagagactttgccgattgaattggcactggaagcacgacaacaaaataaatacgagaattactcaactagtttcttcatccgagatatcataaaaccggaccccccgaagaatctgcaaatgaaaccgcttaaaaattcacaggtagaggtttcgtgggagtacccggatagttggtctacgcctcattcgtattttagcctgaaatttttcgttcgaatacagcgaaaaaaagagaagatgaaagaaactgaagaagggtgtaaccaaaaaggtgcatttctggtggagaaaactagcaccgaggttcaatgcaaaggcggtaacgtgtgcgtacaagctcaagaccgttattataacagtagctgttctaaatgggcttgcgtgccctgccgcgtgagatcatga

SEQ ID NO: 1144 - DNA, 345 bp, Artificial Sequence
  Description of Artificial Sequence: Synthetic polynucleotide
aattgggttaatgttatatctgatttgaaaaaaatagaggatctgattcaatcaatgcacatagatgcgactctgtatactgagagcgatgtgcacccgagttgcaaagttactgctatgaaatgttttctgctggagctgcaagttatctctctggagagtggtgatgcgtctattcacgatactgttgagaatctgattattctggctaataactcgctgtcaagtaatgggaatgttacggaatctggctgtaaggagtgtgaagaattagaagaaaaaaatattaaagagtttctgcagagttttgtgcacattgttcagatgtttatcaatactagctga

SEQ ID NO: 1145 - DNA, 384 bp, Artificial Sequence
  Description of Artificial Sequence: Synthetic polynucleotide
gcaccggcccgcagcccatcaccgtcaactcaaccttgggaacatgtaaatgctattcaagaagctcgccgcctgttgaatttgagtcgcgatactgcagcagagatgaatgagactgtagaggtgatttcagaaatgtttgacctgcaggagccgacttgtttgcaaactcgcctggagctgtacaaacaaggcctgcgtggctcgctgactaaactgaaaggtcctctgacgatgatggcttctcattataaacaacactgcccgcctactccggagacgtcttgcgcgacccagataattacttttgaatcttttaaagagaatctgaaagactttctgctggttatcccgtttgattgttgggaaccggttcaagaataa

SEQ ID NO: 1146 - DNA, 534 bp, Artificial Sequence
  Description of Artificial Sequence: Synthetic polynucleotide
ggtccgcagagggaagaattcccgcgcgatttgagcctgatttcacctcttgctcaggctgtccgctcctcttcgcgtaccccctcggataaacctgtcgcgcacgtggttgcgaacccgcaagcggaagggcagctgcaatggttaaaccgccgggctaatgcactgctggctaatggagttgagttacgcgacaaccaacttgtcgttccttcggaagggctgtatctgatctattcacaggttctctttaaagggcagggttgcccatcaacccacgtgctcctgacacacacgatcagtcgtatcgcggtatcctatcagacgaaagttaacctcctgtcagcgattaaatcgccgtgtcagagagaaactccagagggtgcggaagctaaaccgtggtatgaacctatttatcttggtggagttttccagttggaaaaaggtgatagactgtcggcagagatcaatcgccctgattacctggatttcgctgagtcgggtcaggtttatttcggaattattgcactgtga

SEQ ID NO: 1147 - DNA, 417 bp, Artificial Sequence
  Description of Artificial Sequence: Synthetic polynucleotide
caggatccttacgttaaagaagcagagaatctgaaaaaatactttaatgcaggccacagcgatgtggcagataatggcacgttattcctgggcattctgaaaaattggaaagaagaatctgaccggaagatcatgcaatctcagatcgtatcattttatttcaagttgtttaaaaacttcaaggatgaccagtcgattcaaaaatcagtggaaacgatcaaagaagatatgaacgttaagttcttcaactcaaataaaaaaaaacgcgatgatttcgaaaaactgactaattattcggtaactgatttgaatgttcagcgcaaggcgattcatgaattgattcaggttatggcagaactgtcgccagcggcaaaaacgggtaaacgaaaacgttctcagatgttgtttcgtggttga

SEQ ID NO: 1148 - DNA, 222 bp, Artificial Sequence
  Description of Artificial Sequence: Synthetic polynucleotide
gtgcccctgagccgcaccgtgcgttgtacgtgtatctccatctcaaaccagccggtaaacccgcgtagtttagaaaaactggagattatcccagccagccagttttgcccgcgcgttgagattattgcgaccatgaagaaaaaaggggaaaaacgttgccttaatccagaaagtaaggctatcaaaaacctgttgaaagctgtctcgaaagagcgttcctaa

SEQ ID NO: 1149 - protein, 95 aa, Artificial Sequence
  Description of Artificial Sequence: Synthetic polypeptide
MMKRNILAVIVPALLVAGTANAVPLSRTVRCTCISISNQPVNPRSLEKLEIIPASQFCPRVEIIATMKKKGEKRCLNPESKAIKNLLKAVSKERS

SEQ ID NO: 1150 - protein, 94 aa, Artificial Sequence
  Description of Artificial Sequence: Synthetic polypeptide
MKQSTIALALLPLLFTPVTKAVPLSRTVRCTCISISNQPVNPRSLEKLEIIPASQFCPRVEIIATMKKKGEKRCLNPESKAIKNLLKAVSKERS

SEQ ID NO: 1151 - protein, 112 aa, Artificial Sequence
  Description of Artificial Sequence: Synthetic polypeptide
MNNNDLFQASRRRFLAQLGGLTVAGMLGPSLLTPRRATAVPLSRTVRCTCISISNQPVNPRSLEKLEIIPASQFCPRVEIIATMKKKGEKRCLNPESKAIKNLLKAVSKERS

SEQ ID NO: 1152 - protein, 125 aa, Artificial Sequence
  Description of Artificial Sequence: Synthetic polypeptide
MMKRNILAVIVPALLVAGTANATPVVRKGRCSCISTNQGTIHLQSLKDLKQFAPSPSCEKIEIIATLKNGVQTCLNPDSADVKELIKKWEKQVSQKKKQKNGKKHQKKKVLKVRKSQRSRQKKTT

SEQ ID NO: 1153 - protein, 124 aa, Artificial Sequence
  Description of Artificial Sequence: Synthetic polypeptide
MKQSTIALALLPLLFTPVTKATPVVRKGRCSCISTNQGTIHLQSLKDLKQFAPSPSCEKIEIIATLKNGVQTCLNPDSADVKELIKKWEKQVSQKKKQKNGKKHQKKKVLKVRKSQRSRQKKTT

SEQ ID NO: 1154 - protein, 142 aa, Artificial Sequence
  Description of Artificial Sequence: Synthetic polypeptide
MNNNDLFQASRRRFLAQLGGLTVAGMLGPSLLTPRRATATPVVRKGRCSCISTNQGTIHLQSLKDLKQFAPSPSCEKIEIIATLKNGVQTCLNPDSADVKELIKKWEKQVSQKKKQKNGKKHQKKKVLKVRKSQRSRQKKTT

SEQ ID NO: 1155 - protein, 126 aa, Artificial Sequence
  Description of Artificial Sequence: Synthetic polypeptide
MKQSTIALALLPLLFTPVTKATLVIRNARCSCISTSRGTIHYKSLKDLKQFAPSPNCNKTEIIATLKNGDQTCLDPDSANVKKLMKEWEKKISQKKKQKRGKKHQKNMKNRKPKTPQSRRRSRKTT

SEQ ID NO: 1156 - protein, 127 aa, Artificial Sequence
  Description of Artificial Sequence: Synthetic polypeptide
MMKRNILAVIVPALLVAGTANATLVIRNARCSCISTSRGTIHYKSLKDLKQFAPSPNCNKTEIIATLKNGDQTCLDPDSANVKKLMKEWEKKISQKKKQKRGKKHQKNMKNRKPKTPQSRRRSRKTT

SEQ ID NO: 1157 - protein, 144 aa, Artificial Sequence
  Description of Artificial Sequence: Synthetic polypeptide
MNNNDLFQASRRRFLAQLGGLTVAGMLGPSLLTPRRATATLVIRNARCSCISTSRGTIHYKSLKDLKQFAPSPNCNKTEIIATLKNGDQTCLDPDSANVKKLMKEWEKKISQKKKQKRGKKHQKNMKNRKPKTPQSRRRSRKTT

SEQ ID NO: 1158 - DNA, 285 bp, Artificial Sequence
  Description of Artificial Sequence: Synthetic polynucleotide
atgaagcagagcaccatcgcgcttgccctgctgccgttgcttttcacgcctgtcaccaaggctgtgcccctgagccgcaccgtgcgttgtacgtgtatctccatctcaaaccagccggtaaacccgcgtagtttagaaaaactggagattatcccagccagccagttttgcccgcgcgttgagattattgcgaccatgaagaaaaaaggggaaaaacgttgccttaatccagaaagtaaggctatcaaaaacctgttgaaagctgtctcgaaagagcgttcctaa

SEQ ID NO: 1159 - DNA, 297 bp, Artificial Sequence
  Description of Artificial Sequence: Synthetic polynucleotide
atgaagcagagcaccatcgcgcttgccctgctgccgttgcttttcacgcctgtcaccaaggctatcccactggctcgcacagtccgctgtaattgcatccacatcgatgacggtcctgtgcgtatgcgtgcaatcggtaaacttgaaattatccctgcctccttatcgtgtccccgcgtagagattatcgccacgatgaagaaaaacgatgaacagcgttgtcttaacccagagagcaaaactatcaaaaacctgatgaaggcttttagtcaaaagcgcagtaagcgcgcaccataa

SEQ ID NO: 1160 - DNA, 375 bp, Artificial Sequence
  Description of Artificial Sequence: Synthetic polynucleotide
atgaagcagagcaccatcgcgcttgccctgctgccgttgcttttcacgcctgtcaccaaggctacacccgtagtgcgtaaagggcgctgcagttgcatctcgactaaccaggggacaatccacctgcagtcgctgaaagatttgaagcagtttgcaccgagccctagttgtgaaaaaatcgagatcatcgctacattaaagaacggcgtccaaacatgtcttaaccccgactcagcagatgttaaagaacttattaagaaatgggagaagcaggtaagtcagaaaaagaaacagaaaaatggcaagaaacatcagaaaaagaaagtcttaaaggttcgtaaatcgcagcgttctcgtcaaaagaagacgacgtaa

SEQ ID NO: 1161 - DNA, 381 bp, Artificial Sequence
  Description of Artificial Sequence: Synthetic polynucleotide
atgaagcagagcaccatcgcgcttgccctgctgccgttgcttttcacgcctgtcaccaaggctacgctggtgatccgtaacgcccgctgttcatgcatcagcacttctcgtggaaccatccactataaatcattaaaggacttgaaacagtttgcaccttcaccaaattgtaacaagacggaaattattgctactctgaaaaacggagatcaaacttgcctggaccccgactctgcaaacgtgaagaagctgatgaaggaatgggaaaaaaaaatctctcaaaagaaaaagcaaaagcgcggtaagaaacatcagaagaacatgaagaatcgtaagccaaagacccctcagtcgcgccgtcgttctcgtaagacgacgtaa

SEQ ID NO: 1162 - DNA, 1192 bp, Artificial Sequence
  Description of Artificial Sequence: Synthetic polynucleotide
ccaggatacatagattaccacaactccgagcccttccaccttaagacccactttcacatttaagttgtttttctaatccgcatatgatcaattcaaggccgaataagaaggctggctctgcaccttggtgatcaaataattcgatagcttgtcgtaataatggcggcatactatcagtagtaggtgtttccctttcttctttagcgacttgatgctcttgatcttccaatacgcaacctaaagtaaaatgccccacagcgctgagtgcatataatgcattctctagtgaaaaaccttgttggcataaaaaggctaattgattttcgagagtttcatactgtttttctgtaggccgtgtacctaaatgtacttttgctccatcgcgatgacttagtaaagcacatctaaaacttttagcgttattacgtaaaaaatcttgccagctttccccttctaaagggcaaaagtgagtatggtgcctatctaacatctcaatggctaaggcgtcgagcaaagcccgcttattttttacatgccaatacaatgtaggctgctctacacctagcttctgggcgagtttacgggttgttaaaccttcgattccgacctcattaagcagctctaatgcgctgttaatcactttacttttatctaatctagacatcattaattcctaatttttgttgacactctatcattgatagagttattttaccactccctatcagtgatagagaaaagtgaaataagtttatcaaaataaaaggaggtaatatatgaagcagagcaccatcgcgcttgccctgctgccgttgcttttcacgcctgtcaccaaggctgtgcccctgagccgcaccgtgcgttgtacgtgtatctccatctcaaaccagccggtaaacccgcgtagtttagaaaaactggagattatcccagccagccagttttgcccgcgcgttgagattattgcgaccatgaagaaaaaaggggaaaaacgttgccttaatccagaaagtaaggctatcaaaaacctgttgaaagctgtctcgaaagagcgttcctaaaacgattggtaaacccggtgaacgcatgagaaagcccccggaagatcaccttccgggggcttttttattgcgcggaccaaaacgaaaaaagacgctcgaaagcgtctcttttctggaatttggtaccgagg

SEQ ID NO: 1163 - DNA, 1204 bp, Artificial Sequence
  Description of Artificial Sequence: Synthetic polynucleotide
ccaggatacatagattaccacaactccgagcccttccaccttaagacccactttcacatttaagttgtttttctaatccgcatatgatcaattcaaggccgaataagaaggctggctctgcaccttggtgatcaaataattcgatagcttgtcgtaataatggcggcatactatcagtagtaggtgtttccctttcttctttagcgacttgatgctcttgatcttccaatacgcaacctaaagtaaaatgccccacagcgctgagtgcatataatgcattctctagtgaaaaaccttgttggcataaaaaggctaattgattttcgagagtttcatactgtttttctgtaggccgtgtacctaaatgtacttttgctccatcgcgatgacttagtaaagcacatctaaaacttttagcgttattacgtaaaaaatcttgccagctttccccttctaaagggcaaaagtgagtatggtgcctatctaacatctcaatggctaaggcgtcgagcaaagcccgcttattttttacatgccaatacaatgtaggctgctctacacctagcttctgggcgagtttacgggttgttaaaccttcgattccgacctcattaagcagctctaatgcgctgttaatcactttacttttatctaatctagacatcattaattcctaatttttgttgacactctatcattgatagagttattttaccactccctatcagtgatagagaaaagtgaaataagtttatcaaaataaaaggaggtaatatatgaagcagagcaccatcgcgcttgccctgctgccgttgcttttcacgcctgtcaccaaggctatcccactggctcgcacagtccgctgtaattgcatccacatcgatgacggtcctgtgcgtatgcgtgcaatcggtaaacttgaaattatccctgcctccttatcgtgtccccgcgtagagattatcgccacgatgaagaaaaacgatgaacagcgttgtcttaacccagagagcaaaactatcaaaaacctgatgaaggcttttagtcaaaagcgcagtaagcgcgcaccataaaacgattggtaaacccggtgaacgcatgagaaagcccccggaagatcaccttccgggggcttttttattgcgcggaccaaaacgaaaaaagacgctcgaaagcgtctcttttctggaatttggtaccgagg

SEQ ID NO: 1164 - DNA, 1282 bp, Artificial Sequence
  Description of Artificial Sequence: Synthetic polynucleotide
ccaggatacatagattaccacaactccgagcccttccaccttaagacccactttcacatttaagttgtttttctaatccgcatatgatcaattcaaggccgaataagaaggctggctctgcaccttggtgatcaaataattcgatagcttgtcgtaataatggcggcatactatcagtagtaggtgtttccctttcttctttagcgacttgatgctcttgatcttccaatacgcaacctaaagtaaaatgccccacagcgctgagtgcatataatgcattctctagtgaaaaaccttgttggcataaaaaggctaattgattttcgagagtttcatactgtttttctgtaggccgtgtacctaaatgtacttttgctccatcgcgatgacttagtaaagcacatctaaaacttttagcgttattacgtaaaaaatcttgccagctttccccttctaaagggcaaaagtgagtatggtgcctatctaacatctcaatggctaaggcgtcgagcaaagcccgcttattttttacatgccaatacaatgtaggctgctctacacctagcttctgggcgagtttacgggttgttaaaccttcgattccgacctcattaagcagctctaatgcgctgttaatcactttacttttatctaatctagacatcattaattcctaatttttgttgacactctatcattgatagagttattttaccactccctatcagtgatagagaaaagtgaaataagtttatcaaaataaaaggaggtaatatatgaagcagagcaccatcgcgcttgccctgctgccgttgcttttcacgcctgtcaccaaggctacacccgtagtgcgtaaagggcgctgcagttgcatctcgactaaccaggggacaatccacctgcagtcgctgaaagatttgaagcagtttgcaccgagccctagttgtgaaaaaatcgagatcatcgctacattaaagaacggcgtccaaacatgtcttaaccccgactcagcagatgttaaagaacttattaagaaatgggagaagcaggtaagtcagaaaaagaaacagaaaaatggcaagaaacatcagaaaaagaaagtcttaaaggttcgtaaatcgcagcgttctcgtcaaaagaagacgacgtaaaacgattggtaaacccggtgaacgcatgagaaagcccccggaagatcaccttccgggggcttttttattgcgcggaccaaaacgaaaaaagacgctcgaaagcgtctcttttctggaatttggtaccgagg

SEQ ID NO: 1165 - DNA, 1288 bp, Artificial Sequence
  Description of Artificial Sequence: Synthetic polynucleotide
ccaggatacatagattaccacaactccgagcccttccaccttaagacccactttcacatttaagttgtttttctaatccgcatatgatcaattcaaggccgaataagaaggctggctctgcaccttggtgatcaaataattcgatagcttgtcgtaataatggcggcatactatcagtagtaggtgtttccctttcttctttagcgacttgatgctcttgatcttccaatacgcaacctaaagtaaaatgccccacagcgctgagtgcatataatgcattctctagtgaaaaaccttgttggcataaaaaggctaattgattttcgagagtttcatactgtttttctgtaggccgtgtacctaaatgtacttttgctccatcgcgatgacttagtaaagcacatctaaaacttttagcgttattacgtaaaaaatcttgccagctttccccttctaaagggcaaaagtgagtatggtgcctatctaacatctcaatggctaaggcgtcgagcaaagcccgcttattttttacatgccaatacaatgtaggctgctctacacctagcttctgggcgagtttacgggttgttaaaccttcgattccgacctcattaagcagctctaatgcgctgttaatcactttacttttatctaatctagacatcattaattcctaatttttgttgacactctatcattgatagagttattttaccactccctatcagtgatagagaaaagtgaaataagtttatcaaaataaaaggaggtaatatatgaagcagagcaccatcgcgcttgccctgctgccgttgcttttcacgcctgtcaccaaggctacgctggtgatccgtaacgcccgctgttcatgcatcagcacttctcgtggaaccatccactataaatcattaaaggacttgaaacagtttgcaccttcaccaaattgtaacaagacggaaattattgctactctgaaaaacggagatcaaacttgcctggaccccgactctgcaaacgtgaagaagctgatgaaggaatgggaaaaaaaaatctctcaaaagaaaaagcaaaagcgcggtaagaaacatcagaagaacatgaagaatcgtaagccaaagacccctcagtcgcgccgtcgttctcgtaagacgacgtaaaacgattggtaaacccggtgaacgcatgagaaagcccccggaagatcaccttccgggggcttttttattgcgcggaccaaaacgaaaaaagacgctcgaaagcgtctcttttctggaatttggtaccgagg

SEQ ID NO: 1166 - protein, 6 aa, Artificial Sequence
  Description of Artificial Sequence: Synthetic 6xHis tag
HHHHHH

SEQ ID NO: 1167 - DNA, 858 bp, Artificial Sequence
  Description of Artificial Sequence: Synthetic polynucleotide
aaacaatcgaccatcgcattggcgctgcttcctctattgttcacaccggtgacaaaggcagtcgactataaggatgacgacgacaagcaattgggcggtggccaccgtcgtttggacaaggtggaggaggaagtcaacttgcatgaagattttgtatttatcaagaaattaaagcgttgtaacaagggtgaagggagcttgagtttacttaactgtgaagaaatgcgccgccaattcgaggacttggttaaggacattacccttaacaaggaagaaaagaaagagaacagcttcgaaatgcagcgtggcgatgaagacccccagatcgcggcacatgtcgtttccgaggcaaattcgaatgctgcttcagtcttacaatgggcgaaaaagggctactacacgatgaagtcaaacttagtgatgcttgaaaatggcaagcaattaaccgtgaagcgcgaaggattgtattatgtctacacccaagtaacattttgctccaatcgcgaaccgtcgtcgcagcgccctttcatcgttggtttgtggttgaagccgagctccggttccgagcgtattcttttgaaagccgcaaacacccacagcagctcgcagctgtgtgaacagcagagcgtccacctgggcggcgtatttgaattgcaagcgggagcgtcagttttcgttaatgtgactgaggcttctcaagttatccatcgtgtcggtttctccagcttcggcttactgaagttaaagggcgagctcaattcgaagcttgaaggtaagcctatccctaaccctctcctcggcctcgattctacggatccgaattcgagctccgtcgaccatcaccatcaccaccactga

SEQ ID NO: 1168 - DNA, 791 bp, Artificial Sequence
  Description of Artificial Sequence: Synthetic polynucleotide
tgactagtaaacaatcgaccatcgcattggcgctgcttcctctattgttcacaccggtgacaaaggcagtcgactataaggatgacgacgacaagcaattgggcggtggcatgcaacgtggcgatgaggacccgcaaattgccgcgcatgttgtgtccgaagcgaactccaatgccgcatccgtcctgcaatgggctaagaaaggctattacacgatgaaatcaaacctggttatgcttgagaacggaaagcagcttacagtcaagcgtgagggcctgtattacgtctacacccaagttaccttttgctctaaccgtgagcccagcagccaacgcccttttattgtaggcctgtggttaaagccctcgtcgggttctgaacgcattcttctgaaagctgcgaatacgcactctagtagccagctgtgtgagcaacaatctgtccatcttggtggagtttttgagttacaagctggagcatctgtgttcgtgaatgtaacggaagcatctcaagttatccaccgtgtaggcttctcatcttttggtttattaaaattaaagggcgagctcaattcgaagcttgaaggtaagcctatccctaaccctctcctcggcctcgattctacggatccgaattcgagctccgtcgaccatcaccatcaccaccactgagcatgctaatcagccgtggaattcggtctcaggaggatcagttctggaccagcgagctgtgctgcgactcgtggcgtaatcatggtcatagctgtttcctgtgtgaaattgttatccgct

SEQ ID NO: 1169 - protein, 288 aa, Artificial Sequence
  Description of Artificial Sequence: Synthetic polypeptide
MTSKQSTIALALLPLLFTPVTKAVDYKDDDDKQLGGGHRRLDKVEEEVNLHEDFVFIKKLKRCNKGEGSLSLLNCEEMRRQFEDLVKDITLNKEEKKENSFEMQRGDEDPQIAAHVVSEANSNAASVLQWAKKGYYTMKSNLVMLENGKQLTVKREGLYYVYTQVTFCSNREPSSQRPFIVGLWLKPSSGSERILLKAANTHSSSQLCEQQSVHLGGVFELQAGASVFVNVTEASQVIHRVGFSSFGLLKLKGELNSKLEGKPIPNPLLGLDSTDPNSSSVDHHHHHH

SEQ ID NO: 1170 - protein, 223 aa, Artificial Sequence
  Description of Artificial Sequence: Synthetic polypeptide
MTSKQSTIALALLPLLFTPVTKAVDYKDDDDKQLGGGMQRGDEDPQIAAHVVSEANSNAASVLQWAKKGYYTMKSNLVMLENGKQLTVKREGLYYVYTQVTFCSNREPSSQRPFIVGLWLKPSSGSERILLKAANTHSSSQLCEQQSVHLGGVFELQAGASVFVNVTEASQVIHRVGFSSFGLLKLKGELNSKLEGKPIPNPLLGLDSTDPNSSSVDHHHHHH

SEQ ID NO: 1171 - protein, 215 aa, Homo sapiens
HRRLDKIEDERNLHEDFVFMKTIQRCNTGERSLSLLNCEEIKSQFEGFVKDIMLNKEETKKENSFEMQKGDQNPQIAAHVISEASSKTTSVLQWAEKGYYTMSNNLVTLENGKQLTVKRQGLYYIYAQVTFCSNREASSQAPFIASLCLKSPGRFERILLRAANTHSSAKPCGQQSIHLGGVFELQPGASVFVNVTDPSQVSHGTGFTSFGLLKL

SEQ ID NO: 1172 - DNA, 1251 bp, Artificial Sequence
  Description of Artificial Sequence: Synthetic polynucleotide
atgactagtaaacaatcgaccatcgcattggcgctgcttcctctattgttcacaccggtgacaaaggcagtcgactataaggatgacgacgacaagcaattgggcggtggcaaggaactgaaagtcacccagcctgagaagtctgtctcagtagcggcaggtgacagcacggtgcttaactgcacgcttacttcactgctgccggtaggtcccattaaatggtatcgtggcgtgggccaaagtcgtttgttaatctactcctttacgggtgagcactttccgcgcgtaactaatgtaagcgacgcaacaaaacgtaacaacatggatttcagcattcgcatctcaaacgtcactcccgaggatgctgggacttactactgcgtaaaatttcagaaaggcccctcagagcccgatacagaaatccaatcaggaggcggcacagaagtctacgttctggcaaaaccctctccccctgaagtctccggtccagcagatcgtggcattcctgaccaaaaagtaaatttcacgtgcaaatcgcacgggtttagcccacgcaacatcacactgaagtggtttaaagatggtcaggaacttcatcaccttgagactaccgtgaacccgtccggtaaaaacgtttcctacaatatctcgtccactgtgcgtgttgtattgaatagcatggacgttcacagcaaggtgatctgtgaagtcgctcacattacccttgaccgttcaccattgcgtggtatcgcgaacctgagcaatttcatccgtgtcagcccgacggttaaggttactcagcagtccccaacatcgatgaaccaggtaaatctgacgtgtcgtgcagaacgtttttaccctgaagacctgcagttgatttggctggagaacgggaacgtctcgcgcaatgacacacccaaaaatctgacaaagaatactgacggtacgtacaattatacatcactgtttcttgtgaactcctccgcccatcgcgaggacgtagtctttacatgtcaagtcaagcacgatcagcagcccgcgatcacccgtaatcacacagttctgggcctggctcactcatccgatcagggatcaatgcaaacatttccgggaaacaatgcaacccacaactggaataagggcgagctcaattcgaagcttgaaggtaagcctatccctaaccctctcctcggcctcgattctacggatccgaattcgagctccgtcgaccatcaccatcaccaccactga

SEQ ID NO: 1173 - DNA, 564 bp, Artificial Sequence
  Description of Artificial Sequence: Synthetic polynucleotide
atgactagtaaacaatcgaccatcgcattggcgctgcttcctctattgttcacaccggtgacaaaggcagtcgactataaggatgacgacgacaagcaattgggtggtagcgaagaagaactgcagattatccaaccggacaaatctgttctggtggctgcgggtgaaacggctactttgcgctgcacaatcacctcgctgtttccagtcggaccaatccaatggttccgtggtgcgggaccgggtcgcgtgttgatctacaatcagcgtcaaggccctttcccccgtgttactactgtctccgatacaacaaagcgcaacaacatggacttttccatccgtatcgggaatatcacaccggccgacgcgggaacctattattgcatcaagtttcgcaagggatctccagacgatgttgaatttaagagcggggctggaactgagctgtccgtgcgtgcaaaaccttcgggcagcggcgagctcggtggcagtggtaagcctatccctaaccctctcctcggcctcgattctacgggatccggtcatcatcaccatcaccattga

SEQ ID NO: 1174 - DNA, 357 bp, Artificial Sequence
  Description of Artificial Sequence: Synthetic polynucleotide
gaagaagaactgcagattatccaaccggacaaatctgttctggtggctgcgggtgaaacggctactttgcgctgcacaatcacctcgctgtttccagtcggaccaatccaatggttccgtggtgcgggaccgggtcgcgtgttgatctacaatcagcgtcaaggccctttcccccgtgttactactgtctccgatacaacaaagcgcaacaacatggacttttccatccgtatcgggaatatcacaccggccgacgcgggaacctattattgcatcaagtttcgcaagggatctccagacgatgttgaatttaagagcggggctggaactgagctgtccgtgcgtgcaaaaccttcg

SEQ ID NO: 1175 - DNA, 945 bp, Artificial Sequence
  Description of Artificial Sequence: Synthetic polynucleotide
atgactagtaaacaatcgaccatcgcattggcgctgcttcctctattgttcacaccggtgacaaaggcagtcgactataaggatgacgacgacaagcaattgggtggtagcgaggaggaagtgcaaatcattcaacccgacaaaagcgttagtgtcgcggcgggtgagtccgccatcctgcattgcactatcacatccctgtttcccgtaggtcccattcaatggtttcgtggagccggtccggcgcgtgttcttatctacaatcaacgccagggacccttcccgcgtgttacaacgatcagtgaaactacccgtcgtgaaaacatggactttagcatttcgatctccaacattacacccgctgacgcagggacgtactactgcatcaagtttcgtaaaggatctccagacactgagtttaagtctggcgcagggacggagttgtccgtgcgtgcgaaaccttctggcggaggagggtcggggggcggtggttctgaagaggaagttcagattatccaaccagataaatcagtgtccgtggcggcgggagagtcagctatccttcactgtacaatcacatcgttattccctgtagggccaattcagtggttccgtggggcaggacccgcacgtgtccttatctataatcagcgtcaggggcccttcccacgtgttacgacaatttcagagactactcgccgcgagaacatggacttcagtattagcatctcgaacattaccccggcggacgcgggaacttattactgtatcaagtttcgtaaaggctcgccggacaccgagttcaaatccggggcaggcactgagttgagcgtgcgtgcgaaaccatcgggcagcggcgagctcggtggcagtggtaagcctatccctaaccctctcctcggcctcgattctacgggatccggtcatcatcaccatcaccattga

SEQ ID NO: 1176 - DNA, 1224 bp, Artificial Sequence
  Description of Artificial Sequence: Synthetic polynucleotide
atgactagtaaacaatcgaccatcgcattggcgctgcttcctctattgttcacaccggtgacaaaggcacaattgggtggtagcgaggaggagttacaaattatccaaccagataagtctgtcttggtcgcagccggagaaacggcgacgttacgctgcacaatcacctcactgttcccggtcggtccgattcagtggttccgtggagctggtccgggccgtgtcttaatttacaatcaacgtcaaggaccttttccacgcgtaacaactgtttctgacacaaccaaacgtaacaatatggacttttctattcgtattggcaacattacgccagccgatgcaggtacatactactgtatcaaattccgtaaaggtagtcctgatgacgttgagtttaaaagcggcgcagggacggagctttcagtgcgtgcaaagcccagtgctagcgcggcggcgccgccatgcccgccatgccctgcgcccgagttcttgggtgggccttcagtgttcctttttcccccgaaaccaaaagataccctgatgatttcgcgcacccctgaagttacttgtgtggttgttgacgtctcacaagaggacccagaggtacaattcaactggtatgtggacggagtagaggtgcataacgccaagactaagccccgtgaagagcagttcaattctacataccgtgtagtttcggttttaacggtcttacaccaagattggttgaacggaaaggaatataagtgcaaggtgtccaataagggactgccaagcagtatcgaaaaaacaatctcaaaagcaaagggacaaccgcgtgagccccaggtttacactctgccaccgtcgcaagaggagatgacgaagaatcaggtgtcgttaacctgtttggtcaaaggcttttatccaagcgatatcgcagtggaatgggaatcaaatgggcagcctgaaaataactataagacaaccccgcctgtacttgattctgatggatctttttttctttatagtcgcttaaccgtggataaatcccgttggcaggaaggtaatgtcttctcatgctcggttatgcacgaggcccttcataaccattacactcagaagagcctttctctgagtccggggaaaggcagcggcgagctcggtggcagtggtaagcctatccctaaccctctcctcggcctcgattctacgggatccggtcatcatcaccatcaccattga

SEQ ID NO: 1177 - DNA, 1128 bp, Artificial Sequence
  Description of Artificial Sequence: Synthetic polynucleotide
atgactagtaaacaatcgaccatcgcattggcgctgcttcctctattgttcacaccggtgacaaaggcacaattgggtggtagcgaggaggagttacaaattatccaaccagataagtctgtcttggtcgcagccggagaaacggcgacgttacgctgcacaatcacctcactgttcccggtcggtccgattcagtggttccgtggagctggtccgggccgtgtcttaatttacaatcaacgtcaaggaccttttccacgcgtaacaactgtttctgacacaaccaaacgtaacaatatggacttttctattcgtattggcaacattacgccagccgatgcaggtacatactactgtatcaaattccgtaaaggtagtcctgatgacgttgagtttaaaagcggcgcagggacggagctttcagtgcgtgcaaagcccagtgctagcgcggcggcgccgccatgcccgccatgccctgcgcccgagttcttgggtgggccttcagtgttcctttttcccccgaaaccaaaagataccctgatgatttcgcgcacccctgaagttacttgtgtggttgttgacgtctcacaagaggacccagaggtacaattcaactggtatgtggacggagtagaggtgcataacgccaagactaagccccgtgaagagcagttcaattctacataccgtgtagtttcggttttaacggtcttacaccaagattggttgaacggaaaggaatataagtgcaaggtgtccaataagggactgccaagcagtatcgaaaaaacaatctcaaaagcaaagggacaaccgcgtgagccccaggtttacactctgccaccgtcgcaagaggagatgacgaagaatcaggtgtcgttaacctgtttggtcaaaggcttttatccaagcgatatcgcagtggaatgggaatcaaatgggcagcctgaaaataactataagacaaccccgcctgtacttgattctgatggatctttttttctttatagtcgcttaaccgtggataaatcccgttggcaggaaggtaatgtcttctcatgctcggttatgcacgaggcccttcataaccattacactcagaagagcctttctctgagtccggggaaa

SEQ ID NO: 1178 - DNA, 1191 bp, Artificial Sequence
  Description of Artificial Sequence: Synthetic polynucleotide
atgactagtaaacaatcgaccatcgcattggcgctgcttcctctattgttcacaccggtgacaaaggcacaattgggtggtagcgaagaagaggtgcagatcatccaacccgataaatcggtatctgtcgcagctggggagtcggcgattttgcattgcaccattacatctttgttccctgttgggcctattcaatggtttcgcggggcaggtccggcccgcgtattgatttataaccagcgtcaaggaccgttcccccgtgttacaactatttcggaaacaacacgtcgtgaaaatatggatttctcgatctctatctctaacattactcccgccgatgcagggacttattattgcattaaatttcgcaaaggaagccccgacacggagtttaagagtggagcgggcacggaattatcggtgcgcgcgaaacccagtgctagcgcggcggcgccgccatgcccgccatgccctgcgcccgagttcttgggtgggccttcagtgttcctttttcccccgaaaccaaaagataccctgatgatttcgcgcacccctgaagttacttgtgtggttgttgacgtctcacaagaggacccagaggtacaattcaactggtatgtggacggagtagaggtgcataacgccaagactaagccccgtgaagagcagttcaattctacataccgtgtagtttcggttttaacggtcttacaccaagattggttgaacggaaaggaatataagtgcaaggtgtccaataagggactgccaagcagtatcgaaaaaacaatctcaaaagcaaagggacaaccgcgtgagccccaggtttacactctgccaccgtcgcaagaggagatgacgaagaatcaggtgtcgttaacctgtttggtcaaaggcttttatccaagcgatatcgcagtggaatgggaatcaaatgggcagcctgaaaataactataagacaaccccgcctgtacttgattctgatggatctttttttctttatagtcgcttaaccgtggataaatcccgttggcaggaaggtaatgtcttctcatgctcggttatgcacgaggcccttcataaccattacactcagaagagcctttctctgagtccggggaaaggcagcggcgagctcggtggcagtggtaagcctatccctaaccctctcctcggcctcgattctacg

SEQ ID NO: 1179 - DNA, 1041 bp, Artificial Sequence
  Description of Artificial Sequence: Synthetic polynucleotide
gaagaagaggtgcagatcatccaacccgataaatcggtatctgtcgcagctggggagtcggcgattttgcattgcaccattacatctttgttccctgttgggcctattcaatggtttcgcggggcaggtccggcccgcgtattgatttataaccagcgtcaaggaccgttcccccgtgttacaactatttcggaaacaacacgtcgtgaaaatatggatttctcgatctctatctctaacattactcccgccgatgcagggacttattattgcattaaatttcgcaaaggaagccccgacacggagtttaagagtggagcgggcacggaattatcggtgcgcgcgaaacccagtgctagcgcggcggcgccgccatgcccgccatgccctgcgcccgagttcttgggtgggccttcagtgttcctttttcccccgaaaccaaaagataccctgatgatttcgcgcacccctgaagttacttgtgtggttgttgacgtctcacaagaggacccagaggtacaattcaactggtatgtggacggagtagaggtgcataacgccaagactaagccccgtgaagagcagttcaattctacataccgtgtagtttcggttttaacggtcttacaccaagattggttgaacggaaaggaatataagtgcaaggtgtccaataagggactgccaagcagtatcgaaaaaacaatctcaaaagcaaagggacaaccgcgtgagccccaggtttacactctgccaccgtcgcaagaggagatgacgaagaatcaggtgtcgttaacctgtttggtcaaaggcttttatccaagcgatatcgcagtggaatgggaatcaaatgggcagcctgaaaataactataagacaaccccgcctgtacttgattctgatggatctttttttctttatagtcgcttaaccgtggataaatcccgttggcaggaaggtaatgtcttctcatgctcggttatgcacgaggcccttcataaccattacactcagaagagcctttctctgagtccggggaaa

SEQ ID NO: 1180 - DNA, 681 bp, Artificial Sequence
  Description of Artificial Sequence: Synthetic polynucleotide
gcggcggcgccgccatgcccgccatgccctgcgcccgagttcttgggtgggccttcagtgttcctttttcccccgaaaccaaaagataccctgatgatttcgcgcacccctgaagttacttgtgtggttgttgacgtctcacaagaggacccagaggtacaattcaactggtatgtggacggagtagaggtgcataacgccaagactaagccccgtgaagagcagttcaattctacataccgtgtagtttcggttttaacggtcttacaccaagattggttgaacggaaaggaatataagtgcaaggtgtccaataagggactgccaagcagtatcgaaaaaacaatctcaaaagcaaagggacaaccgcgtgagccccaggtttacactctgccaccgtcgcaagaggagatgacgaagaatcaggtgtcgttaacctgtttggtcaaaggcttttatccaagcgatatcgcagtggaatgggaatcaaatgggcagcctgaaaataactataagacaaccccgcctgtacttgattctgatggatctttttttctttatagtcgcttaaccgtggataaatcccgttggcaggaaggtaatgtcttctcatgctcggttatgcacgaggcccttcataaccattacactcagaagagcctttctctgagtccggggaaa

SEQ ID NO: 1181 - DNA, 929 bp, Artificial Sequence
  Description of Artificial Sequence: Synthetic polynucleotide
atgactagtaaacaatcgaccatcgcattggcgctgcttcctctattgttcacaccggtgacaaaggcacaattgggtggtagccaggttaagttgcttcagtccggtgccgcattagtgaagcctggagcaagtgtcaagatgtcgtgtcaggcaagcgggtacagcttcaccgattattgggtgacgtgggttaaacaatcccacggacaatcattggaatggatcggggaaatctaccccagtaacactgtgacaaattttaacgacaattttaaagggaaggcaacccttacggtggataagtctacttccacagcgtatatggagctgagtcgcctgacttctgaggactctgccatctattactgtacacgtatcgggaacagtgggtatcgtgtagggtggttcatctactgggggcaaggtacccttgtgacagttttatccgggggtggcgggtcgggaggggggggatcaggcggtggagggtcggatacagttctgacccagtctccggcattggcggtgtcaccgggggagcgtgtcacgatcagttgtaaggcatcggaatccgtgtcgagccacatgcactggtaccagcagaaaccggggcagcagcctaaactgttgatttacaaggcatcaaatttagcctctggtgtacccgctcgttttagtggcagtggctcgggaacggacttcactttaacgattgaccctgttgaggcagacgataccgccacttacttctgccagcagggttggaacggcccattcacttttggggccgggacccgtctggaactgaagcgcgcggacgccgctggcagcggcgagctcggtggcagtggtaagcctatccctaaccctctcctcggcctcgattctacgggatccggtcatcaccaccatcaccatcaccattg

SEQ ID NO: 1182 - protein, 415 aa, Artificial Sequence
  Description of Artificial Sequence: Synthetic polypeptide
MTSKQSTIALALLPLLFTPVTKAVDYKDDDDKQLGGGKELKVTQPEKSVSVAAGDSTVLNCTLTSLLPVGPIKWYRGVGQSRLLIYSFTGEHFPRVTNVSDATKRNNMDFSIRISNVTPEDAGTYYCVKFQKGPSEPDTEIQSGGGTEVYVLAKPSPPEVSGPADRGIPDQKVNFTCKSHGFSPRNITLKWFKDGQELHHLETTVNPSGKNVSYNISSTVRVVLNSMDVHSKVICEVAHITLDRSPLRGIANLSNFIRVSPTVKVTQQSPTSMNQVNLTCRAERFYPEDLQLIWLENGNVSRNDTPKNLTKNTDGTYNYTSLFLVNSSAHREDVVFTCQVKHDQQPAITRNHTVLGLAHSSDQGSMQTFPGNNATHNWNKGELNSKEGKPIPNPLLGLDSTDPNSSSVDHHHHHH

SEQ ID NO: 1183 - protein, 187 aa, Artificial Sequence
  Description of Artificial Sequence: Synthetic polypeptide
MTSKQSTIALALLPLLFTPVTKAVDYKDDDDKQLGGSEEELQIIQPDKSVLVAAGETATLRCTITSLFPVGPIQWFRGAGPGRVLIYNQRQGPFPRVTTVSDTTKRNNMDFSIRIGNITPADAGTYYCIKFRKGSPDDVEFKSGAGTELSVRAKPSGSGELGGSGKPIPNPLLGLDSTGSGHHHHHH

SEQ ID NO: 1184 - protein, 119 aa, Artificial Sequence
  Description of Artificial Sequence: Synthetic polypeptide
EEELQIIQPDKSVLVAAGETATLRCTITSLFPVGPIQWFRGAGPGRVLIYNQRQGPFPRVTTVSDTTKRNNMDFSIRIGNITPADAGTYYCIKFRKGSPDDVEFKSGAGTELSVRAKPS

SEQ ID NO: 1185 - protein, 314 aa, Artificial Sequence
  Description of Artificial Sequence: Synthetic polypeptide
MTSKQSTIALALLPLLFTPVTKAVDYKDDDDKQLGGSEEEVQIIQPDKSVSVAAGESAILHCTITSLFPVGPIQWFRGAGPARVLIYNQRQGPFPRVTTISETTRRENMDFSISISNITPADAGTYYCIKFRKGSPDTEFKSGAGTELSVRAKPSGGGGSGGGGSEEEVQIIQPDKSVSVAAGESAILHCTITSLFPVGPIQWFRGAGPARVLIYNQRQGPFPRVTTISETTRRENMDFSISISNITPADAGTYYCIKFRKGSPDTEFKSGAGTELSVRAKPSGSGELGGSGKPIPNPLLGLDSTGSGHHHHHH

SEQ ID NO: 1186 - protein, 246 aa, Artificial Sequence
  Description of Artificial Sequence: Synthetic polypeptide
EEEVQIIQPDKSVSVAAGESAILHCTITSLFPVGPIQWFRGAGPARVLIYNQRQGPFPRVTTISETTRRENMDFSISISNITPADAGTYYCIKFRKGSPDTEFKSGAGTELSVRAKPSGGGGSGGGGSEEEVQIIQPDKSVSVAAGESAILHCTITSLFPVGPIQWFRGAGPARVLIYNQRQGPFPRVTTISETTRRENMDFSISISNITPADAGTYYCIKFRKGSPDTEFKSGAGTELSVRAKPS

SEQ ID NO: 1187 - protein, 416 aa, Artificial Sequence
  Description of Artificial Sequence: Synthetic polypeptide
MTSKQSTIALALLPLLFTPVTKAVDYKDDDDKQLGGSEEELQIIQPDKSVLVAAGETATLRCTITSLFPVGPIQWFRGAGPGRVLIYNQRQGPFPRVTTVSDTTKRNNMDFSIRIGNITPADAGTYYCIKFRKGSPDDVEFKSGAGTELSVRAKPSASAAAPPCPPCPAPEFLGGPSVFLFPPKPKDTLMISRTPEVTCVVVDVSQEDPEVQFNWYVDGVEVHNAKTKPREEQFNSTYRVVSVLTVLHQDWLNGKEYKCKVSNKGLPSSIEKTISKAKGQPREPQVYTLPPSQEEMTKNQVSLTCLVKGFYPSDIAVEWESNGQPENNYKTTPPVLDSDGSFFLYSRLTVDKSRWQEGNVFSCSVMHEALHNHYTQKSLSLSPGKGSGELGGSGKPIPNPLLGLDSTGSGHHHHHH

SEQ ID NO: 1188 - protein, 385 aa, Artificial Sequence
  Description of Artificial Sequence: Synthetic polypeptide
MTSKQSTIALALLPLLFTPVTKAVDYKDDDDKQLGGSEEELQIIQPDKSVLVAAGETATLRCTITSLFPVGPIQWFRGAGPGRVLIYNQRQGPFPRVTTVSDTTKRNNMDFSIRIGNITPADAGTYYCIKFRKGSPDDVEFKSGAGTELSVRAKPSASAAAPPCPPCPAPEFLGGPSVFLFPPKPKDTLMISRTPEVTCVVVDVSQEDPEVQFNWYVDGVEVHNAKTKPREEQFNSTYRVVSVLTVLHQDWLNGKEYKCKVSNKGLPSSIEKTISKAKGQPREPQVYTLPPSQEEMTKNQVSLTCLVKGFYPSDIAVEWESNGQPENNYKTTPPVLDSDGSFFLYSRLTVDKSRWQEGNVFSCSVMHEALHNHYTQKSLSLSPGK

SEQ ID NO: 1189 - protein, 348 aa, Artificial Sequence
  Description of Artificial Sequence: Synthetic polypeptide
EEELQIIQPDKSVLVAAGETATLRCTITSLFPVGPIQWFRGAGPGRVLIYNQRQGPFPRVTTVSDTTKRNNMDFSIRIGNITPADAGTYYCIKFRKGSPDDVEFKSGAGTELSVRAKPSASAAAPPCPPCPAPEFLGGPSVFLFPPKPKDTLMISRTPEVTCVVVDVSQEDPEVQFNWYVDGVEVHNAKTKPREEQFNSTYRVVSVLTVLHQDWLNGKEYKCKVSNKGLPSSIEKTISKAKGQPREPQVYTLPPSQEEMTKNQVSLTCLVKGFYPSDIAVEWESNGQPENNYKTTPPVLDSDGSFFLYSRLTVDKSRWQEGNVFSCSVMHEALHNHYTQKSLSLSPGK

SEQ ID NO: 1190 - protein, 407 aa, Artificial Sequence
  Description of Artificial Sequence: Synthetic polypeptide
MTSKQSTIALALLPLLFTPVTKAQLGGSEEEVQIIQPDKSVSVAAGESAILHCTITSLFPVGPIQWFRGAGPARVLIYNQRQGPFPRVTTISETTRRENMDFSISISNITPADAGTYYCIKFRKGSPDTEFKSGAGTELSVRAKPSASAAAPPCPPCPAPEFLGGPSVFLFPPKPKDTLMISRTPEVTCVVVDVSQEDPEVQFNWYVDGVEVHNAKTKPREEQFNSTYRVVSVLTVLHQDWLNGKEYKCKVSNKGLPSSIEKTISKAKGQPREPQVYTLPPSQEEMTKNQVSLTCLVKGFYPSDIAVEWESNGQPENNYKTTPPVLDSDGSFFLYSRLTVDKSRWQEGNVFSCSVMHEALHNHYTQKSLSLSPGKGSGELGGSGGKPIPNPLLGLDSTGSGHHHHHH

SEQ ID NO: 1191 - protein, 375 aa, Artificial Sequence
  Description of Artificial Sequence: Synthetic polypeptide
MTSKQSTIALALLPLLFTPVTKAQLGGSEEEVQIIQPDKSVSVAAGESAILHCTITSLFPVGPIQWFRGAGPARVLIYNQRQGPFPRVTTISETTRRENMDFSISISNITPADAGTYYCIKFRKGSPDTEFKSGAGTELSVRAKPSASAAAPPCPPCPAPEFLGGPSVFLFPPKPKDTLMISRTPEVTCVVVDVSQEDPEVQFNWYVDGVEVHNAKTKPREEQFNSTYRVVSVLTVLHQDWLNGKEYKCKVSNKGLPSSIEKTISKAKGQPREPQVYTLPPSQEEMTKNQVSLTCLVKGFYPSDIAVEWESNGQPENNYKTTPPVLDSDGSFFLYSRLTVDKSRWQEGNVFSCSVMHEALHNHYTQKSLSLSPGK

SEQ ID NO: 1192 - protein, 347 aa, Artificial Sequence
  Description of Artificial Sequence: Synthetic polypeptide
EEEVQIIQPDKSVSVAAGESAILHCTITSLFPVGPIQWFRGAGPARVLIYNQRQGPFPRVTTISETTRRENMDFSISISNITPADAGTYYCIKFRKGSPDTEFKSGAGTELSVRAKPSASAAAPPCPPCPAPEFLGGPSVFLFPPKPKDTLMISRTPEVTCVVVDVSQEDPEVQFNWYVDGVEVHNAKTKPREEQFNSTYRVVSVLTVLHQDWLNGKEYKCKVSNKGLPSSIEKTISKAKGQPREPQVYTLPPSQEEMTKNQVSLTCLVKGFYPSDIAVEWESNGQPENNYKTTPPVLDSDGSFFLYSRLTVDKSRWQEGNVFSCSVMHEALHNHYTQKSLSLSPGK

SEQ ID NO: 1193 - protein, 118 aa, Artificial Sequence
  Description of Artificial Sequence: Synthetic polypeptide
EEEVQIIQPDKSVSVAAGESAILHCTITSLFPVGPIQWFRGAGPARVLIYNQRQGPFPRVTTISETTRRENMDFSISISNITPADAGTYYCIKFRKGSPDTEFKSGAGTELSVRAKPS

SEQ ID NO: 1194 - protein, 227 aa, Artificial Sequence
  Description of Artificial Sequence: Synthetic polypeptide
AAAPPCPPCPAPEFLGGPSVFLFPPKPKDTLMISRTPEVTCVVVDVSQEDPEVQFNWYVDGVEVHNAKTKPREEQFNSTYRVVSVLTVLHQDWLNGKEYKCKVSNKGLPSSIEKTISKAKGQPREPQVYTLPPSQEEMTKNQVSLTCLVKGFYPSDIAVEWESNGQPENNYKTTPPVLDSDGSFFLYSRLTVDKSRWQEGNVFSCSVMHEALHNHYTQKSLSLSPGK

SEQ ID NO: 1195 - protein, 307 aa, Artificial Sequence
  Description of Artificial Sequence: Synthetic polypeptide
MTSKQSTIALALLPLLFTPVTKAQLGGSQVKLLQSGAALVKPGASVKMSCQASGYSFTDYWVTWVKQSHGQSLEWIGEIYPSNTVTNFNDNFKGKATLTVDKSTSTAYMELSRLTSEDSAIYYCTRIGNSGYRVGWFIYWGQGTLVTVLSGGGGSGGGGSGGGGSDTVLTQSPALAVSPGERVTISCKASESVSSHMHWYQQKPGQQPKLLIYKASNLASGVPARFSGSGSGTDFTLTIDPVEADDTATYFCQQGWNGPFTFGAGTRLELKRADAAGSGELGGSGKPIPNPLLGLDSTGSGHHHHHH

SEQ ID NO: 1196 - protein, 343 aa, Artificial Sequence
  Description of Artificial Sequence: Synthetic polypeptide
EEELQVIQPDKSVLVAAGETATLRCTATSLIPVGPIQWFRGAGPGRELIYNQKEGHFPRVTTVSDLTKRNNMDFSIRIGNITPADAGTYYCVKFRKGSPDDVEFKSGAGTELSVRAKPSAPVVSGPAARATPQHTVSFTCESHGFSPRDITLKWFKNGNELSDFQTNVDPVGESVSYSIHSTAKVVLTREDVHSQVICEVAHVTLQGDPLRGTANLSETIRVPPTLEVTQQPVRAENQVNVTCQVRKFYPQRLQLTWLENGNVSRTETASTVTENKDGTYNWMSWLLVNVSAHRDDVKLTCQVEHDGQPAVSKSHDLKVSAHPKEQGSNTAAENTGSNERNIY

SEQ ID NO: 1197 - protein, 21 aa, Artificial Sequence
  Description of Artificial Sequence: Synthetic peptide
IVVGVVCTLLVALLMAALYLV

SEQ ID NO: 1198 - protein, 110 aa, Artificial Sequence
  Description of Artificial Sequence: Synthetic polypeptide
RIRQKKAQGSTSSTRLHEPEKNAREITQDTNDITYADLNLPKGKKPAPQAAEPNNHTEYASIQTSPQPASEDTLTYADLDMVHLNRTPKQPAPKPEPSFSEYASVQVPRK

SEQ ID NO: 1199 - DNA, 1452 bp, Artificial Sequence
  Description of Artificial Sequence: Synthetic polynucleotide
atgactagtaaacaatcgaccatcgcattggcgctgcttcctctattgttcacaccggtgacaaaggcagtcgactataaggatgacgacgacaagcaattgggcggtggctttcgtgggccattgttacccaaccgtccattcaccactgtctggaacgccaatacacaatggtgtttggagcgtcatggagtcgatgtagatgtatccgtgtttgatgtcgtggcgaacccgggacagacatttcgtggaccggacatgaccatcttttattcgtcacaacttggcacctacccttattacactcccacgggtgagcctgtctttggtggacttcctcaaaatgcttctttgattgcgcacttggcgcgtactttccaagatatcctggctgccatccctgccccggatttttcgggactggctgtaattgattgggaggcatggcgccctcgttgggccttcaactgggatacaaaggacatttaccgccaacgcagccgcgccttggttcaggcccaacaccccgactggccggcgccccaggtggaagcagttgcacaggaccagttccaaggagccgctcgcgcttggatggcgggtactttacagttggggcgcgctttgcgtcctcgcggcttgtggggattctatggttttccagactgctataactacgacttcttgtctcccaactacaccggacagtgtccctctgggattcgtgctcagaatgaccaacttggatggctgtggggccaaagtcgtgcgctgtatccgagcatttatatgccagccgttctggaaggaacaggcaagtctcagatgtacgttcaacatcgtgtagcggaagcctttcgtgtagccgtggcggcaggtgacccaaatttgccggtcttaccttacgtacagattttttatgacactacaaatcacttccttccactggatgagttagaacattcattgggggagtcagcagctcagggcgcggctggggtggtgttgtgggtgagctgggaaaacacgcgtacgaaagagtcatgccaggctatcaaggaatacatggatacaactcttggtccgtttattttgaatgtgacttctggggcgcttttgtgttcccaggctctttgctcaggtcatgggcgttgcgttcgccgtacctcgcatccgaaagcgcttctgcttctgaacccagcgtcattcagcattcaactgacacctggagggggtcctttatcactgcgcggggctttatctttggaagaccaagctcagatggcggtcgagttcaagtgtcgctgctacccaggttggcaggccccgtggtgcgagcgtaaaagtatgtggaagggcgagctcaattcgaagcttgaaggtaagcctatccctaaccctctcctcggcctcgattctacgcgtaccggtcatcatcaccatcaccattga

SEQ ID NO: 1200 - DNA, 1353 bp, Artificial Sequence
  Description of Artificial Sequence: Synthetic polynucleotide
atgactagtaaacaatcgaccatcgcattggcgctgcttcctctattgttcacaccggtgacaaaggcagtcgactataaggatgacgacgacaagcaattgggcggtggctttcgtgggccattgttacccaaccgtccattcaccactgtctggaacgccaatacacaatggtgtttggagcgtcatggagtcgatgtagatgtatccgtgtttgatgtcgtggcgaacccgggacagacatttcgtggaccggacatgaccatcttttattcgtcacaacttggcacctacccttattacactcccacgggtgagcctgtctttggtggacttcctcaaaatgcttctttgattgcgcacttggcgcgtactttccaagatatcctggctgccatccctgccccggatttttcgggactggctgtaattgattgggaggcatggcgccctcgttgggccttcaactgggatacaaaggacatttaccgccaacgcagccgcgccttggttcaggcccaacaccccgactggccggcgccccaggtggaagcagttgcacaggaccagttccaaggagccgctcgcgcttggatggcgggtactttacagttggggcgcgctttgcgtcctcgcggcttgtggggattctatggttttccagactgctataactacgacttcttgtctcccaactacaccggacagtgtccctctgggattcgtgctcagaatgaccaacttggatggctgtggggccaaagtcgtgcgctgtatccgagcatttatatgccagccgttctggaaggaacaggcaagtctcagatgtacgttcaacatcgtgtagcggaagcctttcgtgtagccgtggcggcaggtgacccaaatttgccggtcttaccttacgtacagattttttatgacactacaaatcacttccttccactggatgagttagaacattcattgggggagtcagcagctcagggcgcggctggggtggtgttgtgggtgagctgggaaaacacgcgtacgaaagagtcatgccaggctatcaaggaatacatggatacaactcttggtccgtttattttgaatgtgacttctggggcgcttttgtgttcccaggctctttgctcaggtcatgggcgttgcgttcgccgtacctcgcatccgaaagcgcttctgcttctgaacccagcgtcattcagcattcaactgacacctggagggggtcctttatcactgcgcggggctttatctttggaagaccaagctcagatggcggtcgagttcaagtgtcgctgctacccaggttggcaggccccgtggtgcgagcgtaaaagtatgtgg

SEQ ID NO: 1201 - DNA, 1440 bp, Artificial Sequence
  Description of Artificial Sequence: Synthetic polynucleotide
atgactagtaaacaatcgaccatcgcattggcgctgcttcctctattgttcacaccggtgacaaaggcagtcgactataaggatgacgacgacaagcaattgggcggtggctctgttgttagcaaccgtccctttatcactgtgtggaacggtgacacacattggtgtttaaccgagtacggggtcgatgtggacgtttcggtctttgacgtcgtggctaataaagagcaatctttccaaggctctaatatgaccatcttctatcgtgaagagcttggcacatacccatactacaccccaactggcgagccagtctttggggggcttccgcaaaatgcctctttggtgactcatctggcgcataccttccaagatatcaaagcggcgatgcccgaaccagatttttccgggttagcggtaatcgactgggaggcatggcgtcctcgctgggcttttaactgggatagtaaagatatttatcgccaacgttctatggaacttgtgcaagcagaacatcctgattggcctgagaccctggtggaggcagctgctaaaaatcagttccaggaggcagcagaagcgtggatggccggaacgctgcagttggggcaagtgttgcgcccgcgcggactttggggctattatggattccccgactgttataacaatgacttcctttcgttaaattacaccggccaatgtcccgtgttcgttcgtgatcagaatgatcagttgggatggttgtggaaccagtcatacgccctttatccatccatctatttacccgccgctttaatgggcacggagaaatctcagatgtatgttcgccaccgtgttcaggaagcattgcgtgttgctattgtttcccgtgacccccacgttccggtcatgccatacgtccaaatcttttacgaaatgaccgactatttgttaccgttagaagagcttgaacacagtttgggggagtcagctgcacaaggtgtagcgggagcagtgctttggttgagttcagacaaaacgtctactaaagaatcatgtcaagcaattaaagcatacatggattccaccttgggtccgtttatcgtgaacgtcacatcggcggcattgttatgctcagaagccctttgctcggggcatggccgctgtgttcgtcatccaagctaccccgaggctctgttgacattgaatcctgcaagtttttcgatcgaactgacacatgacgggcgcccacccagtcttaaaggcaccctttcattgaaagatcgtgctcagatggcgatgaaattccgctgtcgttgctatcgtggttggcgcggcaagtggtgcgataaacgtggtatgaagggcgagctcaattcgaagcttgaaggtaagcctatccctaaccctctcctcggcctcgattctacgcgtaccggtcatcatcaccatcaccattga

SEQ ID NO: 1202 - DNA, 1580 bp, Artificial Sequence
  Description of Artificial Sequence: Synthetic polynucleotide
atgaaacaatcgaccatcgcattggcgctgcttcctctattgttcacaccggtgacaaaggcacaattgggcggtggcatgaaagagattgctgttaccatcgacgataaaaacgtgattgcttcagtcagtgaaagctttcacggcgtcgctttcgacgcttccctgttttctccgaaaggcctgtggagttttgttgacattacgtcacccaagctgtttaaactgcttgagggcctgtctccaggttactttcgcgttggcgggacattcgcgaactggttattcttcgacttagacgagaacaacaagtggaaggattactgggcttttaaagacaaaactcctgagacagccacaattacgcgccgttggttgtttcgcaagcaaaacaatttaaagaaggagacgttcgatgatcttgtcaagctgactaaaggatcaaagatgcgtcttttgtttgacctgaatgcagaagttcgcacagggtacgaaattggcaaaaagatgaccagcacttgggattcatctgaagctgaaaagctgttcaagtactgtgttagcaagggttacggagacaatattgactgggagcttggtaacgaacccgaccacacaagcgcacataacttaactgagaagcaggtgggtgaagatttcaaggcgctgcataaagttttggagaagtatccaaccttaaataaaggatcgttggtagggcctgacgtagggtggatgggggtatcatacgttaaaggtctggccgatggtgcaggtgaccatgtgacagcttttacgttacatcaatactacttcgatggtaacacgtcggatgtgtcaacttacttggacgctacctactttaaaaagttacaacagctgttcgataaggtaaaagacgtcttgaaaaattccccacataaagacaaacccctttggcttggcgaaactagctcgggttacaacagcggaacgaaagatgtgtctgaccgttatgtgtcagggttcttgacacttgataaattgggccttagcgccgctaacaacgtgaaggtcgtcattcgccagactatctataatggttactatggcttgttagacaaaaacacccttgagcctaacccggactattggttgatgcatgtacataactcgctggtagggaacactgtgttcaaggttgacgtgtctgatcctactaacaaggcccgtgtttacgcgcagtgtaccaaaactaatagcaaacatacacaatctcgctactacaaaggttcccttaccatttttgctttgaatgtcggcgacgaggatgtgaccttaaagattgaccaatattctgggaagaaaatttattcatatattctgactccagaggggggtcaactgaccagccaaaaagtacttttgaatggcaaggagttgaaactggtgagcgatcagcttccagagctgaacgcggatgagtccaaaacatcatttacattatctcctaagacgttcgggtttttcgtcgtgagtgacgctaatgtagaagcatgtaagaaaggatccggtcatcaccaccatcaccatcaccatta

SEQ ID NO: 1203 - DNA, 1545 bp, Artificial Sequence
  Description of Artificial Sequence: Synthetic polynucleotide
atgaaacaatcgaccatcgcattggcgctgcttcctctattgttcacaccggtgacaaaggcacaattgggcggtggcatgaaagagattgctgttaccatcgacgataaaaacgtgattgcttcagtcagtgaaagctttcacggcgtcgctttcgacgcttccctgttttctccgaaaggcctgtggagttttgttgacattacgtcacccaagctgtttaaactgcttgagggcctgtctccaggttactttcgcgttggcgggacattcgcgaactggttattcttcgacttagacgagaacaacaagtggaaggattactgggcttttaaagacaaaactcctgagacagccacaattacgcgccgttggttgtttcgcaagcaaaacaatttaaagaaggagacgttcgatgatcttgtcaagctgactaaaggatcaaagatgcgtcttttgtttgacctgaatgcagaagttcgcacagggtacgaaattggcaaaaagatgaccagcacttgggattcatctgaagctgaaaagctgttcaagtactgtgttagcaagggttacggagacaatattgactgggagcttggtaacgaacccgaccacacaagcgcacataacttaactgagaagcaggtgggtgaagatttcaaggcgctgcataaagttttggagaagtatccaaccttaaataaaggatcgttggtagggcctgacgtagggtggatgggggtatcatacgttaaaggtctggccgatggtgcaggtgaccatgtgacagcttttacgttacatcaatactacttcgatggtaacacgtcggatgtgtcaacttacttggacgctacctactttaaaaagttacaacagctgttcgataaggtaaaagacgtcttgaaaaattccccacataaagacaaacccctttggcttggcgaaactagctcgggttacaacagcggaacgaaagatgtgtctgaccgttatgtgtcagggttcttgacacttgataaattgggccttagcgccgctaacaacgtgaaggtcgtcattcgccagactatctataatggttactatggcttgttagacaaaaacacccttgagcctaacccggactattggttgatgcatgtacataactcgctggtagggaacactgtgttcaaggttgacgtgtctgatcctactaacaaggcccgtgtttacgcgcagtgtaccaaaactaatagcaaacatacacaatctcgctactacaaaggttcccttaccatttttgctttgaatgtcggcgacgaggatgtgaccttaaagattgaccaatattctgggaagaaaatttattcatatattctgactccagaggggggtcaactgaccagccaaaaagtacttttgaatggcaaggagttgaaactggtgagcgatcagcttccagagctgaacgcggatgagtccaaaacatcatttacattatctcctaagacgttcgggtttttcgtcgtgagtgacgctaatgtagaagcatgtaagaaa

SEQ ID NO: 1204 - protein, 483 aa, Artificial Sequence
  Description of Artificial Sequence: Synthetic polypeptide
MTSKQSTIALALLPLLFTPVTKAVDYKDDDDKQLGGGFRGPLLPNRPFTTVWNANTQWCLERHGVDVDVSVFDVVANPGQTFRGPDMTIFYSSQLGTYPYYTPTGEPVFGGLPQNASLIAHLARTFQDILAAIPAPDFSGLAVIDWEAWRPRWAFNWDTKDIYRQRSRALVQAQHPDWPAPQVEAVAQDQFQGAARAWMAGTLQLGRALRPRGLWGFYGFPDCYNYDFLSPNYTGQCPSGIRAQNDQLGWLWGQSRALYPSIYMPAVLEGTGKSQMYVQHRVAEAFRVAVAAGDPNLPVLPYVQIFYDTTNHFLPLDELEHSLGESAAQGAAGVVLWVSWENTRTKESCQAIKEYMDTTLGPFILNVTSGALLCSQALCSGHGRCVRRTSHPKALLLLNPASFSIQLTPGGGPLSLRGALSLEDQAQMAVEFKCRCYPGWQAPWCERKSMWKGELNSKLEGKPIPNPLLGLDSTRTGHHHHHH

SEQ ID NO: 1205 - protein, 414 aa, Homo sapiens
FRGPLLPNRPFTTVWNANTQWCLERHGVDVDVSVFDVVANPGQTFRGPDMTIFYSSQLGTYPYYTPTGEPVFGGLPQNASLIAHLARTFQDILAAIPAPDFSGLAVIDWEAWRPRWAFNWDTKDIYRQRSRALVQAQHPDWPAPQVEAVAQDQFQGAARAWMAGTLQLGRALRPRGLWGFYGFPDCYNYDFLSPNYTGQCPSGIRAQNDQLGWLWGQSRALYPSIYMPAVLEGTGKSQMYVQHRVAEAFRVAVAAGDPNLPVLPYVQIFYDTTNHFLPLDELEHSLGESAAQGAAGVVLWVSWENTRTKESCQAIKEYMDTTLGPFILNVTSGALLCSQALCSGHGRCVRRTSHPKALLLLNPASFSIQLTPGGGPLSLRGALSLEDQAQMAVEFKCRCYPGWQAPWCERKSMW

SEQ ID NO: 1206 - protein, 451 aa, Artificial Sequence
  Description of Artificial Sequence: Synthetic polypeptide
MTSKQSTIALALLPLLFTPVTKAVDYKDDDDKQLGGGFRGPLLPNRPFTTVWNANTQWCLERHGVDVDVSVFDVVANPGQTFRGPDMTIFYSSQLGTYPYYTPTGEPVFGGLPQNASLIAHLARTFQDILAAIPAPDFSGLAVIDWEAWRPRWAFNWDTKDIYRQRSRALVQAQHPDWPAPQVEAVAQDQFQGAARAWMAGTLQLGRALRPRGLWGFYGFPDCYNYDFLSPNYTGQCPSGIRAQNDQLGWLWGQSRALYPSIYMPAVLEGTGKSQMYVQHRVAEAFRVAVAAGDPNLPVLPYVQIFYDTTNHFLPLDELEHSLGESAAQGAAGVVLWVSWENTRTKESCQAIKEYMDTTLGPFILNVTSGALLCSQALCSGHGRCVRRTSHPKALLLLNPASFSIQLTPGGGPLSLRGALSLEDQAQMAVEFKCRCYPGWQAPWCERKSMW

SEQ ID NO: 1207 - protein, 499 aa, Artificial Sequence
  Description of Artificial Sequence: Synthetic polypeptide
MTSKQSTIALALLPLLFTPVTKAKQSTIALALLPLLFTPVTKAVDYKDDDDKDLGGGSVVSNRPFITVWNGDTHWCLTEYGVDVDVSVFDVVANKEQSFQGSNMTIFYREELGTYPYYTPTGEPVFGGLPQNASLVTHLAHTFQDIKAAMPEPDFSGLAVIDWEAWRPRWAFNWDSKDIYRQRSMELVQAEHPDWPETLVEAAAKNQFQEAAEAWMAGTLQLGQVLRPRGLWGYYGFPDCYNNDFLSLNYTGQCPVFVRDQNDQLGWLWNQSYALYPSIYLPAALMGTEKSQMYVRHRVQEALRVAIVSRDPHVPVMPYVQIFYEMTDYLLPLEELEHSLGESAAQGVAGAVLWLSSDKTSTKESCQAIKAYMDSTLGPFIVNVTSAALLCSEALCSGHGRCVRHPSYPEALLTLNPASFSIELTHDGRPPSLKGTLSLKDRAQMAMKFRCRCYRGWRGKWCDKRGMKGELNSKLEGKPIPNPLLGLDSTRTGHHHHHH

SEQ ID NO: 1208 - protein, 489 aa, Artificial Sequence
  Description of Artificial Sequence: Synthetic polypeptide
MKEIAVTIDDKNVIASVSESFHGVAFDASLFSPKGLWSFVDITSPKLFKLLEGLSPGYFRVGGTFANWLFFDLDENNKWKDYWAFKDKTPETATITRRWLFRKQNNLKKETFDDLVKLTKGSKMRLLFDLNAEVRTGYEIGKKMTSTWDSSEAEKLFKYCVSKGYGDNIDWELGNEPDHTSAHNLTEKQVGEDFKALHKVLEKYPTLNKGSLVGPDVGWMGVSYVKGLADGAGDHVTAFTLHQYYFDGNTSDVSTYLDATYFKKLQQLFDKVKDVLKNSPHKDKPLWLGETSSGYNSGTKDVSDRYVSGFLTLDKLGLSAANNVKVVIRQTIYNGYYGLLDKNTLEPNPDYWLMHVHNSLVGNTVFKVDVSDPTNKARVYAQCTKTNSKHTQSRYYKGSLTIFALNVGDEDVTLKIDQYSGKKIYSYILTPEGGQLTSQKVLLNGKELKLVSDQLPELNADESKTSFTLSPKTFGFFVVSDANVEACKK

SEQ ID NO: 1209 - protein, 78 aa, Homo sapiens
ITCPPPMSVEHADIWVKSYSLYSRERYICNSGFKRKAGTSSLTECVLNKATNVAHWTTPSLKCIRDPALVHQRPAPPS

SEQ ID NO: 1210 - protein, 248 aa, Artificial Sequence
  Description of Artificial Sequence: Synthetic polypeptide
MFKSTLAAMAAVFALSALSPAAMADYKDDDDKIEGRITCPPPMSVEHADIWVKSYSLYSRERYICNSGFKRKAGTSSLTECVLNKATNVAHWTTPSLKCIRDPALVHQRPAPPSSGGSGGGGSGGGSGGGGSLQNWVNVISDLKKIEDLIQSMHIDATLYTESDVHPSCKVTAMKCFLLELQVISLESGDASIHDTVENLIILANDSLSSNGNVTESGCKECEELEEKNIKEFLQSFVHIVQMFINTS

SEQ ID NO: 1211 - protein, 212 aa, Artificial Sequence
  Description of Artificial Sequence: Synthetic polypeptide
ITCPPPMSVEHADIWVKSYSLYSRERYICNSGFKRKAGTSSLTECVLNKATNVAHWTTPSLKCIRDPALVHQRPAPPSSGGSGGGGSGGGSGGGGSLQNWVNVISDLKKIEDLIQSMHIDATLYTESDVHPSCKVTAMKCFLLELQVISLESGDASIHDTVENLIILANDSLSSNGNVTESGCKECEELEEKNIKEFLQSFVHIVQMFINTS

SEQ ID NO: 1212 - protein, 114 aa, Homo sapiens
NWVNVISDLKKIEDLIQSMHIDATLYTESDVHPSCKVTAMKCFLLELQVISLESGDASIHDTVENLIILANDSLSSNGNVTESGCKECEELEEKNIKEFLQSFVHIVQMFINTS

SEQ ID NO: 1213 - protein, 20 aa, Artificial Sequence
  Description of Artificial Sequence: Synthetic peptide
SGGSGGGGSGGGSGGGGSLQ

SEQ ID NO: 1214 - DNA, 234 bp, Artificial Sequence
  Description of Artificial Sequence: Synthetic polynucleotide
atcacctgcccgcctccaatgtctgttgagcacgcagatatttgggtaaaatcttactctttatattcccgtgaacgctatatctgtaatagtggcttcaagcgcaaggcaggcacatcctcactgacggagtgtgttttaaacaaagcaacaaacgtcgctcactggacgacgcccagcctgaagtgcatccgcgacccggcattggtccatcaacgtccagcccctccctca

SEQ ID NO: 1215 - DNA, 747 bp, Artificial Sequence
  Description of Artificial Sequence: Synthetic polynucleotide
atgtttaagtctacacttgcagccatggccgcagtcttcgcactgtcagccttgagtcctgctgcaatggcagattataaagacgatgacgataagatcgaaggacgtatcacctgcccgcctccaatgtctgttgagcacgcagatatttgggtaaaatcttactctttatattcccgtgaacgctatatctgtaatagtggcttcaagcgcaaggcaggcacatcctcactgacggagtgtgttttaaacaaagcaacaaacgtcgctcactggacgacgcccagcctgaagtgcatccgcgacccggcattggtccatcaacgtccagcccctccctcatccggagggagcggcggcgggggtagtggaggcgggtcaggcggcgggggctcacttcagaactgggtgaatgtcatctcggacttaaagaagattgaagacttgattcagagcatgcatatcgacgcgactttatacaccgagtctgacgtacacccaagttgcaaggtcaccgccatgaagtgcttcttgcttgagttacaagtcatcagtttggaatctggagacgctagtattcacgatacggtggaaaacctgatcatccttgcaaatgactctctttcatccaatggtaatgttactgagtcggggtgcaaagaatgtgaagaacttgaggagaagaacattaaggaatttcttcagtcattcgtgcatatcgtacagatgttcatcaacacctcttaa

SEQ ID NO: 1216 - DNA, 639 bp, Artificial Sequence
  Description of Artificial Sequence: Synthetic polynucleotide
atcacctgcccgcctccaatgtctgttgagcacgcagatatttgggtaaaatcttactctttatattcccgtgaacgctatatctgtaatagtggcttcaagcgcaaggcaggcacatcctcactgacggagtgtgttttaaacaaagcaacaaacgtcgctcactggacgacgcccagcctgaagtgcatccgcgacccggcattggtccatcaacgtccagcccctccctcatccggagggagcggcggcgggggtagtggaggcgggtcaggcggcgggggctcacttcagaactgggtgaatgtcatctcggacttaaagaagattgaagacttgattcagagcatgcatatcgacgcgactttatacaccgagtctgacgtacacccaagttgcaaggtcaccgccatgaagtgcttcttgcttgagttacaagtcatcagtttggaatctggagacgctagtattcacgatacggtggaaaacctgatcatccttgcaaatgactctctttcatccaatggtaatgttactgagtcggggtgcaaagaatgtgaagaacttgaggagaagaacattaaggaatttcttcagtcattcgtgcatatcgtacagatgttcatcaacacctcttaa

SEQ ID NO: 1217 - DNA, 342 bp, Artificial Sequence
  Description of Artificial Sequence: Synthetic polynucleotide
aactgggtgaatgtcatctcggacttaaagaagattgaagacttgattcagagcatgcatatcgacgcgactttatacaccgagtctgacgtacacccaagttgcaaggtcaccgccatgaagtgcttcttgcttgagttacaagtcatcagtttggaatctggagacgctagtattcacgatacggtggaaaacctgatcatccttgcaaatgactctctttcatccaatggtaatgttactgagtcggggtgcaaagaatgtgaagaacttgaggagaagaacattaaggaatttcttcagtcattcgtgcatatcgtacagatgttcatcaacacctct

SEQ ID NO: 1218 - DNA, 60 bp, Artificial Sequence
  Description of Artificial Sequence: Synthetic oligonucleotide
tccggagggagcggcggcgggggtagtggaggcgggtcaggcggcgggggctcacttcag

SEQ ID NO: 1219 - DNA, 36 bp, Artificial Sequence
  Description of Artificial Sequence: Synthetic oligonucleotide
gattataaagacgatgacgataagatcgaaggacgt

SEQ ID NO: 1220 - DNA, 537 bp, Artificial Sequence
  Description of Artificial Sequence: Synthetic polynucleotide
atgaagaaaatttggctggcacttgccggtttggtattagcgttttccgcctcggcaagccccggacaaggcacccaatcagagaatagctgtacacatttccctggtaatcttcctaatatgctgcgtgacctgcgcgatgcgttcagtcgcgttaaaactttttttcaaatgaaagaccagttggataaccttttattaaaagaatcactgttagaggattttaaggggtatctgggatgccaggccctgtccgagatgattcaattttacctggaagaggtaatgccccaagctgagaaccaggacccggacatcaaggcgcacgttaactctttaggggagaatctgaaaaccttacgtctgcgtcttcgtcgctgccatcgcttccttccgtgcgaaaataaatcgaaagccgtggagcaagtcaaaaacgctttcaataagctgcaggagaagggaatttataaggctatgagtgagttcgatattttcattaactacattgaggcttatatgacaatgaagattcgcaat

SEQ ID NO: 1221 - DNA, 1044 bp, Artificial Sequence
  Description of Artificial Sequence: Synthetic polynucleotide
atgaagcaggcgcttcgcgttgcgtttgggttccttatcctgtgggcatccgtacttcacgccagccccggacaaggcacccaatcagagaatagctgtacacatttccctggtaatcttcctaatatgctgcgtgacctgcgcgatgcgttcagtcgcgttaaaactttttttcaaatgaaagaccagttggataaccttttattaaaagaatcactgttagaggattttaaggggtatctgggatgccaggccctgtccgagatgattcaattttacctggaagaggtaatgccccaagctgagaaccaggacccggacatcaaggcgcacgttaactctttaggggagaatctgaaaaccttacgtctgcgtcttcgtcgctgccatcgcttccttccgtgcgaaaataaatcgaaagccgtggagcaagtcaaaaacgctttcaataagctgcaggagaagggaatttataaggctatgagtgagttcgatattttcattaactacattgaggcttatatgacaatgaagattcgcaatggtggtggttcgggcggtgggtcaccaggtcagggtacgcaatccgaaaactcatgcactcatttcccaggtaacctgccgaacatgctgcgcgacctgcgcgatgcgttttcgcgtgtaaagactttcttccaaatgaaagatcaattagataacctgcttttaaaagagtcgctgcttgaagacttcaaaggctacttaggctgtcaagcccttagtgagatgatccaattttatcttgaggaagtcatgccgcaagcagaaaatcaggacccggatatcaaggcgcacgttaacagccttggtgagaatctgaaaacattacgcttgcgtttacgtcgctgccaccgttttctgccatgcgaaaacaagtcgaaagcagtcgagcaagtaaagaatgcctttaacaagctgcaggagaagggcatttataaagcgatgtcggagttcgatatctttatcaactacattgaagcatacatgacgatgaagatccgcaac

SEQ ID NO: 1222 - DNA, 1035 bp, Artificial Sequence
  Description of Artificial Sequence: Synthetic polynucleotide
atgcgcgtactgttattccttctgttgtctctttttatgttgcccgctttcagtagccccggacaaggcacccaatcagagaatagctgtacacatttccctggtaatcttcctaatatgctgcgtgacctgcgcgatgcgttcagtcgcgttaaaactttttttcaaatgaaagaccagttggataaccttttattaaaagaatcactgttagaggattttaaggggtatctgggatgccaggccctgtccgagatgattcaattttacctggaagaggtaatgccccaagctgagaaccaggacccggacatcaaggcgcacgttaactctttaggggagaatctgaaaaccttacgtctgcgtcttcgtcgctgccatcgcttccttccgtgcgaaaataaatcgaaagccgtggagcaagtcaaaaacgctttcaataagctgcaggagaagggaatttataaggctatgagtgagttcgatattttcattaactacattgaggcttatatgacaatgaagattcgcaatggtggtggttcgggcggtgggtcaccaggtcagggtacgcaatccgaaaactcatgcactcatttcccaggtaacctgccgaacatgctgcgcgacctgcgcgatgcgttttcgcgtgtaaagactttcttccaaatgaaagatcaattagataacctgcttttaaaagagtcgctgcttgaagacttcaaaggctacttaggctgtcaagcccttagtgagatgatccaattttatcttgaggaagtcatgccgcaagcagaaaatcaggacccggatatcaaggcgcacgttaacagccttggtgagaatctgaaaacattacgcttgcgtttacgtcgctgccaccgttttctgccatgcgaaaacaagtcgaaagcagtcgagcaagtaaagaatgcctttaacaagctgcaggagaagggcatttataaagcgatgtcggagttcgatatctttatcaactacattgaagcatacatgacgatgaagatccgcaac

SEQ ID NO: 1223 - DNA, 1044 bp, Artificial Sequence
  Description of Artificial Sequence: Synthetic polynucleotide
atgaagaagactgccatcgctattgccgtcgcccttgcgggtttcgcaaccgtggcgcaagcaagccccggacaaggcacccaatcagagaatagctgtacacatttccctggtaatcttcctaatatgctgcgtgacctgcgcgatgcgttcagtcgcgttaaaactttttttcaaatgaaagaccagttggataaccttttattaaaagaatcactgttagaggattttaaggggtatctgggatgccaggccctgtccgagatgattcaattttacctggaagaggtaatgccccaagctgagaaccaggacccggacatcaaggcgcacgttaactctttaggggagaatctgaaaaccttacgtctgcgtcttcgtcgctgccatcgcttccttccgtgcgaaaataaatcgaaagccgtggagcaagtcaaaaacgctttcaataagctgcaggagaagggaatttataaggctatgagtgagttcgatattttcattaactacattgaggcttatatgacaatgaagattcgcaatggtggtggttcgggcggtgggtcaccaggtcagggtacgcaatccgaaaactcatgcactcatttcccaggtaacctgccgaacatgctgcgcgacctgcgcgatgcgttttcgcgtgtaaagactttcttccaaatgaaagatcaattagataacctgcttttaaaagagtcgctgcttgaagacttcaaaggctacttaggctgtcaagcccttagtgagatgatccaattttatcttgaggaagtcatgccgcaagcagaaaatcaggacccggatatcaaggcgcacgttaacagccttggtgagaatctgaaaacattacgcttgcgtttacgtcgctgccaccgttttctgccatgcgaaaacaagtcgaaagcagtcgagcaagtaaagaatgcctttaacaagctgcaggagaagggcatttataaagcgatgtcggagttcgatatctttatcaactacattgaagcatacatgacgatgaagatccgcaac

SEQ ID NO: 1224 - DNA, 1047 bp, Artificial Sequence
  Description of Artificial Sequence: Synthetic polynucleotide
atgaaatatctgcttccaacggctgctgctggcctgttgcttcttgccgcccagcctgcgatggctagccccggacaaggcacccaatcagagaatagctgtacacatttccctggtaatcttcctaatatgctgcgtgacctgcgcgatgcgttcagtcgcgttaaaactttttttcaaatgaaagaccagttggataaccttttattaaaagaatcactgttagaggattttaaggggtatctgggatgccaggccctgtccgagatgattcaattttacctggaagaggtaatgccccaagctgagaaccaggacccggacatcaaggcgcacgttaactctttaggggagaatctgaaaaccttacgtctgcgtcttcgtcgctgccatcgcttccttccgtgcgaaaataaatcgaaagccgtggagcaagtcaaaaacgctttcaataagctgcaggagaagggaatttataaggctatgagtgagttcgatattttcattaactacattgaggcttatatgacaatgaagattcgcaatggtggtggttcgggcggtgggtcaccaggtcagggtacgcaatccgaaaactcatgcactcatttcccaggtaacctgccgaacatgctgcgcgacctgcgcgatgcgttttcgcgtgtaaagactttcttccaaatgaaagatcaattagataacctgcttttaaaagagtcgctgcttgaagacttcaaaggctacttaggctgtcaagcccttagtgagatgatccaattttatcttgaggaagtcatgccgcaagcagaaaatcaggacccggatatcaaggcgcacgttaacagccttggtgagaatctgaaaacattacgcttgcgtttacgtcgctgccaccgttttctgccatgcgaaaacaagtcgaaagcagtcgagcaagtaaagaatgcctttaacaagctgcaggagaagggcatttataaagcgatgtcggagttcgatatctttatcaactacattgaagcatacatgacgatgaagatccgcaac

SEQ ID NO: 1225 - DNA, 981 bp, Artificial Sequence; identical to SEQ ID NO: 492
  Description of Artificial Sequence: Synthetic polynucleotide

SEQ ID NO: 1226 - DNA, 480 bp, Homo sapiens
agccccggacaaggcacccaatcagagaatagctgtacacatttccctggtaatcttcctaatatgctgcgtgacctgcgcgatgcgttcagtcgcgttaaaactttttttcaaatgaaagaccagttggataaccttttattaaaagaatcactgttagaggattttaaggggtatctgggatgccaggccctgtccgagatgattcaattttacctggaagaggtaatgccccaagctgagaaccaggacccggacatcaaggcgcacgttaactctttaggggagaatctgaaaaccttacgtctgcgtcttcgtcgctgccatcgcttccttccgtgcgaaaataaatcgaaagccgtggagcaagtcaaaaacgctttcaataagctgcaggagaagggaatttataaggctatgagtgagttcgatattttcattaactacattgaggcttatatgacaatgaagattcgcaat

SEQ ID NO: 1227 - DNA, 22 bp, Artificial Sequence
  Description of Artificial Sequence: Synthetic oligonucleotide
tggtggtggttcgggcggtggg

SEQ ID NO: 1228 - DNA, 543 bp, Artificial Sequence
  Description of Artificial Sequence: Synthetic polynucleotide
atgaagcaggcgcttcgcgttgcgtttgggttccttatcctgtgggcatccgtacttcacgccagccccggacaaggcacccaatcagagaatagctgtacacatttccctggtaatcttcctaatatgctgcgtgacctgcgcgatgcgttcagtcgcgttaaaactttttttcaaatgaaagaccagttggataaccttttattaaaagaatcactgttagaggattttaaggggtatctgggatgccaggccctgtccgagatgattcaattttacctggaagaggtaatgccccaagctgagaaccaggacccggacatcaaggcgcacgttaactctttaggggagaatctgaaaaccttacgtctgcgtcttcgtcgctgccatcgcttccttccgtgcgaaaataaatcgaaagccgtggagcaagtcaaaaacgctttcaataagctgcaggagaagggaatttataaggctatgagtgagttcgatattttcattaactacattgaggcttatatgacaatgaagattcgcaat

SEQ ID NO: 1229 - DNA, 534 bp, Artificial Sequence
  Description of Artificial Sequence: Synthetic polynucleotide
atgcgcgtactgttattccttctgttgtctctttttatgttgcccgctttcagtagccccggacaaggcacccaatcagagaatagctgtacacatttccctggtaatcttcctaatatgctgcgtgacctgcgcgatgcgttcagtcgcgttaaaactttttttcaaatgaaagaccagttggataaccttttattaaaagaatcactgttagaggattttaaggggtatctgggatgccaggccctgtccgagatgattcaattttacctggaagaggtaatgccccaagctgagaaccaggacccggacatcaaggcgcacgttaactctttaggggagaatctgaaaaccttacgtctgcgtcttcgtcgctgccatcgcttccttccgtgcgaaaataaatcgaaagccgtggagcaagtcaaaaacgctttcaataagctgcaggagaagggaatttataaggctatgagtgagttcgatattttcattaactacattgaggcttatatgacaatgaagattcgcaat

SEQ ID NO: 1230 - protein, 346 aa, Artificial Sequence
  Description of Artificial Sequence: Synthetic polypeptide
MKKIWLALAGLVLAFSASASPGQGTQSENSCTHFPGNLPNMLRDLRDAFSRVKTFFQMKDQLDNLLLKESLLEDFKGYLGCQALSEMIQFYLEEVMPQAENQDPDIKAHVNSLGENLKTLRLRLRRCHRFLPCENKSKAVEQVKNAFNKLQEKGIYKAMSEFDIFINYIEAYMTMKIRNGGGSGGGSPGQGTQSENSCTHFPGNLPNMLRDLRDAFSRVKTFFQMKDQLDNLLLKESLLEDFKGYLGCQALSEMIQFYLEEVMPQAENQDPDIKAHVNSLGENLKTLRLRLRRCHRFLPCENKSKAVEQVKNAFNKLQEKGIYKAMSEFDIFINYIEAYMTMKIRN

SEQ ID NO: 1231 - protein, 348 aa, Artificial Sequence
  Description of Artificial Sequence: Synthetic polypeptide
MKQALRVAFGFLILWASVLHASPGQGTQSENSCTHFPGNLPNMLRDLRDAFSRVKTFFQMKDQLDNLLLKESLLEDFKGYLGCQALSEMIQFYLEEVMPQAENQDPDIKAHVNSLGENLKTLRLRLRRCHRFLPCENKSKAVEQVKNAFNKLQEKGIYKAMSEFDIFINYIEAYMTMKIRNGGGSGGGSPGQGTQSENSCTHFPGNLPNMLRDLRDAFSRVKTFFQMKDQLDNLLLKESLLEDFKGYLGCQALSEMIQFYLEEVMPQAENQDPDIKAHVNSLGENLKTLRLRLRRCHRFLPCENKSKAVEQVKNAFNKLQEKGIYKAMSEFDIFINYIEAYMTMKIRN

SEQ ID NO: 1232 - protein, 345 aa, Artificial Sequence
  Description of Artificial Sequence: Synthetic polypeptide
MRVLLFLLLSLFMLPAFSSPGQGTQSENSCTHFPGNLPNMLRDLRDAFSRVKTFFQMKDQLDNLLLKESLLEDFKGYLGCQALSEMIQFYLEEVMPQAENQDPDIKAHVNSLGENLKTLRLRLRRCHRFLPCENKSKAVEQVKNAFNKLQEKGIYKAMSEFDIFINYIEAYMTMKIRNGGGSGGGSPGQGTQSENSCTHFPGNLPNMLRDLRDAFSRVKTFFQMKDQLDNLLLKESLLEDFKGYLGCQALSEMIQFYLEEVMPQAENQDPDIKAHVNSLGENLKTLRLRLRRCHRFLPCENKSKAVEQVKNAFNKLQEKGIYKAMSEFDIFINYIEAYMTMKIRN

SEQ ID NO: 1233 - protein, 348 aa, Artificial Sequence
  Description of Artificial Sequence: Synthetic polypeptide
MKKTAIAIAVALAGFATVAQASPGQGTQSENSCTHFPGNLPNMLRDLRDAFSRVKTFFQMKDQLDNLLLKESLLEDFKGYLGCQALSEMIQFYLEEVMPQAENQDPDIKAHVNSLGENLKTLRLRLRRCHRFLPCENKSKAVEQVKNAFNKLQEKGIYKAMSEFDIFINYIEAYMTMKIRNGGGSGGGSPGQGTQSENSCTHFPGNLPNMLRDLRDAFSRVKTFFQMKDQLDNLLLKESLLEDFKGYLGCQALSEMIQFYLEEVMPQAENQDPDIKAHVNSLGENLKTLRLRLRRCHRFLPCENKSKAVEQVKNAFNKLQEKGIYKAMSEFDIFINYIEAYMTMKIRN

SEQ ID NO: 1234 - protein, 349 aa, Artificial Sequence
  Description of Artificial Sequence: Synthetic polypeptide
MKYLLPTAAAGLLLLAAQPAMASPGQGTQSENSCTHFPGNLPNMLRDLRDAFSRVKTFFQMKDQLDNLLLKESLLEDFKGYLGCQALSEMIQFYLEEVMPQAENQDPDIKAHVNSLGENLKTLRLRLRRCHRFLPCENKSKAVEQVKNAFNKLQEKGIYKAMSEFDIFINYIEAYMTMKIRNGGGSGGGSPGQGTQSENSCTHFPGNLPNMLRDLRDAFSRVKTFFQMKDQLDNLLLKESLLEDFKGYLGCQALSEMIQFYLEEVMPQAENQDPDIKAHVNSLGENLKTLRLRLRRCHRFLPCENKSKAVEQVKNAFNKLQEKGIYKAMSEFDIFINYIEAYMTMKIRN

SEQ ID NO: 1235 - protein, 160 aa, Artificial Sequence; identical to SEQ ID NO: 497
  Description of Artificial Sequence: Synthetic polypeptide

SEQ ID NO: 1236 - protein, 327 aa, Homo sapiens; identical to SEQ ID NO: 143

SEQ ID NO: 1237 - protein, 179 aa, Artificial Sequence
  Description of Artificial Sequence: Synthetic polypeptide
MKKIWLALAGLVLAFSASASPGQGTQSENSCTHFPGNLPNMLRDLRDAFSRVKTFFQMKDQLDNLLLKESLLEDFKGYLGCQALSEMIQFYLEEVMPQAENQDPDIKAHVNSLGENLKTLRLRLRRCHRFLPCENKSKAVEQVKNAFNKLQEKGIYKAMSEFDIFINYIEAYMTMKIRN

SEQ ID NO: 1238 - protein, 181 aa, Artificial Sequence
  Description of Artificial Sequence: Synthetic polypeptide
MKQALRVAFGFLILWASVLHASPGQGTQSENSCTHFPGNLPNMLRDLRDAFSRVKTFFQMKDQLDNLLLKESLLEDFKGYLGCQALSEMIQFYLEEVMPQAENQDPDIKAHVNSLGENLKTLRLRLRRCHRFLPCENKSKAVEQVKNAFNKLQEKGIYKAMSEFDIFINYIEAYMTMKIRN

SEQ ID NO: 1239 - protein, 178 aa, Artificial Sequence
  Description of Artificial Sequence: Synthetic polypeptide
MRVLLFLLLSLFMLPAFSSPGQGTQSENSCTHFPGNLPNMLRDLRDAFSRVKTFFQMKDQLDNLLLKESLLEDFKGYLGCQALSEMIQFYLEEVMPQAENQDPDIKAHVNSLGENLKTLRLRLRRCHRFLPCENKSKAVEQVKNAFNKLQEKGIYKAMSEFDIFINYIEAYMTMKIRN

SEQ ID NO: 1240 - protein, 33 aa, Artificial Sequence; identical to SEQ ID NO: 148
  Description of Artificial Sequence: Synthetic polypeptide

SEQ ID NO: 1241 - protein, 232 aa, Artificial Sequence
  Description of Artificial Sequence: Synthetic polypeptide
MGYKMNISSLRKAFIFMGAVAALSLVNAQSALAHADGSFSDEMNTILDNLAARDFINWLIQTKITDGGGGSGGGGSGGGGSGGGGSAPISSHCRLDKSNFQQPYITNRTFMLAKEASLADNNTDVRLIGEKLFHGVSMSERCYLMKQVLNFTLEEVLFPQSDRFQPYMQEVVPFLARLSNRLSTCHIEGDDLHIQRNVQKLKDTVKKLGESGEIKAIGELDLLFMSLRNACI

SEQ ID NO: 1242 - protein, 217 aa, Artificial Sequence
  Description of Artificial Sequence: Synthetic polypeptide
MRVLLFLLLSLFMLPAFSHADGSFSDEMNTILDNLAARDFINWLIQTKITDGGGGSGGGGSGGGGSGGGGSAPISSHCRLDKSNFQQPYITNRTFMLAKEASLADNNTDVRLIGEKLFHGVSMSERCYLMKQVLNFTLEEVLFPQSDRFQPYMQEVVPFLARLSNRLSTCHIEGDDLHIQRNVQKLKDTVKKLGESGEIKAIGELDLLFMSLRNACI

SEQ ID NO: 1243 - DNA, 596 bp, Artificial Sequence
  Description of Artificial Sequence: Synthetic polynucleotide
atgcggatggcagtttcagtgatgaaatgaacacgattttggataatttagcagccagggatttcataaactggttaattcaaactaaaataacggatggagggggtggttcgggcggcggtggcagtggaggcggtgggtctggcgggggtggatctgcacccatcagttctcactgccgtttagacaaaagtaatttccagcaaccatatattaccaatcgtacgttcatgctggctaaggaagcatcgcttgctgacaataacactgatgtacgcctgatcggcgaaaaattatttcacggcgtgtccatgtctgaacgctgttatcttatgaagcaggtgttaaattttacccttgaagaagtactgtttccgcaaagcgaccgtttccagccttacatgcaagaagtcgtgccgttcttggctcgtttgtcgaaccgcctgtcaacgtgccatattgaaggagatgacttgcacatccaacgcaacgtccaaaaattgaaagatacggtaaaaaaactgggtgaaagcggagaaattaaggctattggcgagctggatcttctgttcatgtcgttacgcaatgcctgcatt

SEQ ID NO: 1244 - DNA, 696 bp, Artificial Sequence
  Description of Artificial Sequence: Synthetic polynucleotide
atggggtacaaaatgaacattagctcgcttcgcaaagcattcatttttatgggggctgttgcagctttaagccttgtcaatgcccagtcagcgcttgcccatgcggatggcagtttcagtgatgaaatgaacacgattttggataatttagcagccagggatttcataaactggttaattcaaactaaaataacggatggagggggtggttcgggcggcggtggcagtggaggcggtgggtctggcgggggtggatctgcacccatcagttctcactgccgtttagacaaaagtaatttccagcaaccatatattaccaatcgtacgttcatgctggctaaggaagcatcgcttgctgacaataacactgatgtacgcctgatcggcgaaaaattatttcacggcgtgtccatgtctgaacgctgttatcttatgaagcaggtgttaaattttacccttgaagaagtactgtttccgcaaagcgaccgtttccagccttacatgcaagaagtcgtgccgttcttggctcgtttgtcgaaccgcctgtcaacgtgccatattgaaggagatgacttgcacatccaacgcaacgtccaaaaattgaaagatacggtaaaaaaactgggtgaaagcggagaaattaaggctattggcgagctggatcttctgttcatgtcgttacgcaatgcctgcatt

SEQ ID NO: 1245 - DNA, 650 bp, Artificial Sequence
  Description of Artificial Sequence: Synthetic polynucleotide
atgcgcgtactgttattccttctgttgtctctttttatgttgcccgctttcagtatgcggatggcagtttcagtgatgaaatgaacacgattttggataatttagcagccagggatttcataaactggttaattcaaactaaaataacggatggagggggtggttcgggcggcggtggcagtggaggcggtgggtctggcgggggtggatctgcacccatcagttctcactgccgtttagacaaaagtaatttccagcaaccatatattaccaatcgtacgttcatgctggctaaggaagcatcgcttgctgacaataacactgatgtacgcctgatcggcgaaaaattatttcacggcgtgtccatgtctgaacgctgttatcttatgaagcaggtgttaaattttacccttgaagaagtactgtttccgcaaagcgaccgtttccagccttacatgcaagaagtcgtgccgttcttggctcgtttgtcgaaccgcctgtcaacgtgccatattgaaggagatgacttgcacatccaacgcaacgtccaaaaattgaaagatacggtaaaaaaactgggtgaaagcggagaaattaaggctattggcgagctggatcttctgttcatgtcgttacgcaatgcctgcatt

SEQ ID NO: 1246 - protein, 380 aa, Artificial Sequence
  Description of Artificial Sequence: Synthetic polypeptide
HADGSFSDEMNTILDNLAARDFINWLIQTKITDGGGGSGGGGSGGGGSGGGGSSPGQGTQSENSCTHFPGNLPNMLRDLRDAFSRVKTFFQMKDQLDNLLLKESLLEDFKGYLGCQALSEMIQFYLEEVMPQAENQDPDIKAHVNSLGENLKTLRLRLRRCHRFLPCENKSKAVEQVKNAFNKLQEKGIYKAMSEFDIFINYIEAYMTMKIRNGGGSGGGSPGQGTQSENSCTHFPGNLPNMLRDLRDAFSRVKTFFQMKDQLDNLLLKESLLEDFKGYLGCQALSEMIQFYLEEVMPQAENQDPDIKAHVNSLGENLKTLRLRLRRCHRFLPCENKSKAVEQVKNAFNKLQEKGIYKAMSEFDIFINYIEAYMTMKIRN

SEQ ID NO: 1247 - protein, 413 aa, Artificial Sequence
  Description of Artificial Sequence: Synthetic polypeptide
MGYKMNISSLRKAFIFMGAVAALSLVNAQSALAHADGSFSDEMNTILDNLAARDFINWLIQTKITDGGGGSGGGGSGGGGSGGGGSSPGQGTQSENSCTHFPGNLPNMLRDLRDAFSRVKTFFQMKDQLDNLLLKESLLEDFKGYLGCQALSEMIQFYLEEVMPQAENQDPDIKAHVNSLGENLKTLRLRLRRCHRFLPCENKSKAVEQVKNAFNKLQEKGIYKAMSEFDIFINYIEAYMTMKIRNGGGSGGGSPGQGTQSENSCTHFPGNLPNMLRDLRDAFSRVKTFFQMKDQLDNLLLKESLLEDFKGYLGCQALSEMIQFYLEEVMPQAENQDPDIKAHVNSLGENLKTLRLRLRRCHRFLPCENKSKAVEQVKNAFNKLQEKGIYKAMSEFDIFINYIEAYMTMKIRN

SEQ ID NO: 1248 - protein, 398 aa, Artificial Sequence
  Description of Artificial Sequence: Synthetic polypeptide
MRVLLFLLLSLFMLPAFSHADGSFSDEMNTILDNLAARDFINWLIQTKITDGGGGSGGGGSGGGGSGGGGSSPGQGTQSENSCTHFPGNLPNMLRDLRDAFSRVKTFFQMKDQLDNLLLKESLLEDFKGYLGCQALSEMIQFYLEEVMPQAENQDPDIKAHVNSLGENLKTLRLRLRRCHRFLPCENKSKAVEQVKNAFNKLQEKGIYKAMSEFDIFINYIEAYMTMKIRNGGGSGGGSPGQGTQSENSCTHFPGNLPNMLRDLRDAFSRVKTFFQMKDQLDNLLLKESLLEDFKGYLGCQALSEMIQFYLEEVMPQAENQDPDIKAHVNSLGENLKTLRLRLRRCHRFLPCENKSKAVEQVKNAFNKLQEKGIYKAMSEFDIFINYIEAYMTMKIRN

SEQ ID NO: 1249 - DNA, 1140 bp, Artificial Sequence
  Description of Artificial Sequence: Synthetic polynucleotide
catgcggatggcagtttcagtgatgaaatgaacacgattttggataatttagcagccagggatttcataaactggttaattcaaactaaaataacggatggagggggtggttcgggcggcggtggcagtggaggcggtgggtctggcgggggtggatctagccccggacaaggcacccaatcagagaatagctgtacacatttccctggtaatcttcctaatatgctgcgtgacctgcgcgatgcgttcagtcgcgttaaaactttcttccaaatgaaagaccagttggataaccttttattaaaagaatcactgttagaggattttaaggggtatctgggatgccaggccctgtccgagatgattcaattttacctggaagaggtaatgccccaagctgagaaccaggacccggacatcaaggcgcacgttaactctttaggggagaatctgaaaaccttacgtctgcgtcttcgtcgctgccatcgcttccttccgtgcgaaaataaatcgaaagccgtggagcaagtcaaaaacgctttcaataagctgcaggagaagggaatttataaggctatgagtgagttcgatattttcattaactacattgaggcttatatgacaatgaagattcgcaatggtggtggttcgggcggtgggtcaccaggtcagggtacgcaatccgaaaactcatgcactcatttcccaggtaacctgccgaacatgctgcgcgacctgcgcgatgcgttttcgcgtgtaaagactttcttccaaatgaaagatcaattagataacctgcttttaaaagagtcgctgcttgaagacttcaaaggctacttaggctgtcaagcccttagtgagatgatccaattttatcttgaggaagtcatgccgcaagcagaaaatcaggacccggatatcaaggcgcacgttaacagccttggtgagaatctgaaaacattacgcttgcgtttacgtcgctgccaccgttttctgccatgcgaaaacaagtcgaaagcagtcgagcaagtaaagaatgcctttaacaagctgcaggagaagggcatttataaagcgatgtcggagttcgatatctttatcaactacattgaagcatacatgacgatgaagatccgcaac

SEQ ID NO: 1250 - DNA, 1239 bp, Artificial Sequence
  Description of Artificial Sequence: Synthetic polynucleotide
atggggtacaaaatgaacattagctcgcttcgcaaagcattcatttttatgggggctgttgcagctttaagccttgtcaatgcccagtcagcgcttgcccatgcggatggcagtttcagtgatgaaatgaacacgattttggataatttagcagccagggatttcataaactggttaattcaaactaaaataacggatggagggggtggttcgggcggcggtggcagtggaggcggtgggtctggcgggggtggatctagccccggacaaggcacccaatcagagaatagctgtacacatttccctggtaatcttcctaatatgctgcgtgacctgcgcgatgcgttcagtcgcgttaaaactttcttccaaatgaaagaccagttggataaccttttattaaaagaatcactgttagaggattttaaggggtatctgggatgccaggccctgtccgagatgattcaattttacctggaagaggtaatgccccaagctgagaaccaggacccggacatcaaggcgcacgttaactctttaggggagaatctgaaaaccttacgtctgcgtcttcgtcgctgccatcgcttccttccgtgcgaaaataaatcgaaagccgtggagcaagtcaaaaacgctttcaataagctgcaggagaagggaatttataaggctatgagtgagttcgatattttcattaactacattgaggcttatatgacaatgaagattcgcaatggtggtggttcgggcggtgggtcaccaggtcagggtacgcaatccgaaaactcatgcactcatttcccaggtaacctgccgaacatgctgcgcgacctgcgcgatgcgttttcgcgtgtaaagactttcttccaaatgaaagatcaattagataacctgcttttaaaagagtcgctgcttgaagacttcaaaggctacttaggctgtcaagcccttagtgagatgatccaattttatcttgaggaagtcatgccgcaagcagaaaatcaggacccggatatcaaggcgcacgttaacagccttggtgagaatctgaaaacattacgcttgcgtttacgtcgctgccaccgttttctgccatgcgaaaacaagtcgaaagcagtcgagcaagtaaagaatgcctttaacaagctgcaggagaagggcatttataaagcgatgtcggagttcgatatctttatcaactacattgaagcatacatgacgatgaagatccgcaac

SEQ ID NO: 1251 - DNA, 1194 bp, Artificial Sequence
  Description of Artificial Sequence: Synthetic polynucleotide
atgcgcgtactgttattccttctgttgtctctttttatgttgcccgctttcagtcatgcggatggcagtttcagtgatgaaatgaacacgattttggataatttagcagccagggatttcataaactggttaattcaaactaaaataacggatggagggggtggttcgggcggcggtggcagtggaggcggtgggtctggcgggggtggatctagccccggacaaggcacccaatcagagaatagctgtacacatttccctggtaatcttcctaatatgctgcgtgacctgcgcgatgcgttcagtcgcgttaaaactttcttccaaatgaaagaccagttggataaccttttattaaaagaatcactgttagaggattttaaggggtatctgggatgccaggccctgtccgagatgattcaattttacctggaagaggtaatgccccaagctgagaaccaggacccggacatcaaggcgcacgttaactctttaggggagaatctgaaaaccttacgtctgcgtcttcgtcgctgccatcgcttccttccgtgcgaaaataaatcgaaagccgtggagcaagtcaaaaacgctttcaataagctgcaggagaagggaatttataaggctatgagtgagttcgatattttcattaactacattgaggcttatatgacaatgaagattcgcaatggtggtggttcgggcggtgggtcaccaggtcagggtacgcaatccgaaaactcatgcactcatttcccaggtaacctgccgaacatgctgcgcgacctgcgcgatgcgttttcgcgtgtaaagactttcttccaaatgaaagatcaattagataacctgcttttaaaagagtcgctgcttgaagacttcaaaggctacttaggctgtcaagcccttagtgagatgatccaattttatcttgaggaagtcatgccgcaagcagaaaatcaggacccggatatcaaggcgcacgttaacagccttggtgagaatctgaaaacattacgcttgcgtttacgtcgctgccaccgttttctgccatgcgaaaacaagtcgaaagcagtcgagcaagtaaagaatgcctttaacaagctgcaggagaagggcatttataaagcgatgtcggagttcgatatctttatcaactacattgaagcatacatgacgatgaagatccgcaac

SEQ ID NO: 1252 - DNA, 1791 bp, Artificial Sequence
  Description of Artificial Sequence: Synthetic polynucleotide
atggggtacaaaatgaacattagctcgcttcgcaaagcattcatttttatgggggctgttgcagctttaagccttgtcaatgcccagtcagcgcttgccgtcgactataaggatgacgacgacaagcaattgggcggtggcatctgggagcttaagaaggacgtgtatgtagtggagttagactggtatccagatgcccccggagagatggtggtcttaacatgtgacactccagaggaggacgggattacctggacacttgaccagtcaagcgaggtattgggttctggaaagacgcttactattcaagtcaaagaatttggggatgccgggcagtatacatgtcacaagggcggcgaagttctgtcgcactccttacttttgttacacaaaaaagaagacggcatttggtccacagacatccttaaggaccaaaaggagccgaagaataagacgtttctgcgctgtgaagcgaagaactatagtggtcgctttacttgctggtggttgacgaccatttccactgatttaaccttttcggtaaagagttctcgcgggagttccgacccacagggcgtgacttgtggcgcagccacactttcggcggaacgcgttcgtggggacaataaggaatacgaatattcggtcgagtgtcaggaagattcagcttgccctgccgctgaggagtcacttccgattgaagtgatggttgacgccgtgcacaaattaaagtatgaaaattacacgtcatctttctttatccgtgacattattaagcccgacccgccaaagaatctgcagcttaaacccctgaagaacagccgccaggtggaagtaagctgggaatatcctgacacctggtccactccgcattcgtatttctcgttgacgttttgtgttcaggtgcagggaaagagcaagcgcgaaaagaaggatcgcgtctttacagacaaaacgtccgcgacggttatttgtcgtaagaatgctagtatctctgttcgcgctcaggaccgttattactcatctagttggtcggagtgggcctcggttccctgctctgggggtggaggatcgggtggaggtggctcgggaggtggcggctcccgtaatttaccggtggctactcctgacccagggatgttcccgtgcttgcaccatagccaaaacttacttcgcgctgtcagcaacatgcttcagaaagcacgtcaaacgcttgagttttacccgtgtactagcgaagagatcgatcacgaggacattaccaaagacaaaacctccaccgtcgaggcctgccttccacttgaactgacgaaaaatgagtcatgcttaaattctcgtgaaacctccttcattactaacggatcgtgcctggcctcgcgcaagacttcgttcatgatggcattatgcttgtcgtctatttatgaagaccttaaaatgtatcaagtggagttcaagacgatgaatgcaaaacttcttatggacccgaagcgtcaaatcttcttagaccaaaacatgttggccgtgatcgatgaactgatgcaagccttgaattttaattcggaaactgtaccgcaaaaatcttctcttgaagaaccggatttctataagaccaaaattaaactttgtattttacttcacgctttccgcatccgtgcagtaactatcgaccgcgtaatgagttaccttaacgcctcgggtggcgagctcggtggcagtggtaagcctatccctaaccctctcctcggcctcgattctacgggatccggtcatcaccaccatcaccatcaccat

SEQ ID NO: 1253 - DNA, 1749 bp, Artificial Sequence
  Description of Artificial Sequence: Synthetic polynucleotide
atgaaaaagatttggctggctcttgccggtttagtcctggcattcagcgcaagcgcggtcgactataaggatgacgacgacaagcaattgggcggtggcatctgggagcttaagaaggacgtgtatgtagtggagttagactggtatccagatgcccccggagagatggtggtcttaacatgtgacactccagaggaggacgggattacctggacacttgaccagtcaagcgaggtattgggttctggaaagacgcttactattcaagtcaaagaatttggggatgccgggcagtatacatgtcacaagggcggcgaagttctgtcgcactccttacttttgttacacaaaaaagaagacggcatttggtccacagacatccttaaggaccaaaaggagccgaagaataagacgtttctgcgctgtgaagcgaagaactatagtggtcgctttacttgctggtggttgacgaccatttccactgatttaaccttttcggtaaagagttctcgcgggagttccgacccacagggcgtgacttgtggcgcagccacactttcggcggaacgcgttcgtggggacaataaggaatacgaatattcggtcgagtgtcaggaagattcagcttgccctgccgctgaggagtcacttccgattgaagtgatggttgacgccgtgcacaaattaaagtatgaaaattacacgtcatctttctttatccgtgacattattaagcccgacccgccaaagaatctgcagcttaaacccctgaagaacagccgccaggtggaagtaagctgggaatatcctgacacctggtccactccgcattcgtatttctcgttgacgttttgtgttcaggtgcagggaaagagcaagcgcgaaaagaaggatcgcgtctttacagacaaaacgtccgcgacggttatttgtcgtaagaatgctagtatctctgttcgcgctcaggaccgttattactcatctagttggtcggagtgggcctcggttccctgctctgggggtggaggatcgggtggaggtggctcgggaggtggcggctcccgtaatttaccggtggctactcctgacccagggatgttcccgtgcttgcaccatagccaaaacttacttcgcgctgtcagcaacatgcttcagaaagcacgtcaaacgcttgagttttacccgtgtactagcgaagagatcgatcacgaggacattaccaaagacaaaacctccaccgtcgaggcctgccttccacttgaactgacgaaaaatgagtcatgcttaaattctcgtgaaacctccttcattactaacggatcgtgcctggcctcgcgcaagacttcgttcatgatggcattatgcttgtcgtctatttatgaagaccttaaaatgtatcaagtggagttcaagacgatgaatgcaaaacttcttatggacccgaagcgtcaaatcttcttagaccaaaacatgttggccgtgatcgatgaactgatgcaagccttgaattttaattcggaaactgtaccgcaaaaatcttctcttgaagaaccggatttctataagaccaaaattaaactttgtattttacttcacgctttccgcatccgtgcagtaactatcgaccgcgtaatgagttaccttaacgcctcgggtggcgagctcggtggcagtggtaagcctatccctaaccctctcctcggcctcgattctacgggatccggtcatcaccaccatcaccatcaccat

SEQ ID NO: 1254 - DNA, 1755 bp, Artificial Sequence
  Description of Artificial Sequence: Synthetic polynucleotide
atgaaacagagcacaatcgctttagccttgctgcctcttcttttcacgcctgtcacgaaggcagtcgactataaggatgacgacgacaagcaattgggcggtggcatctgggagcttaagaaggacgtgtatgtagtggagttagactggtatccagatgcccccggagagatggtggtcttaacatgtgacactccagaggaggacgggattacctggacacttgaccagtcaagcgaggtattgggttctggaaagacgcttactattcaagtcaaagaatttggggatgccgggcagtatacatgtcacaagggcggcgaagttctgtcgcactccttacttttgttacacaaaaaagaagacggcatttggtccacagacatccttaaggaccaaaaggagccgaagaataagacgtttctgcgctgtgaagcgaagaactatagtggtcgctttacttgctggtggttgacgaccatttccactgatttaaccttttcggtaaagagttctcgcgggagttccgacccacagggcgtgacttgtggcgcagccacactttcggcggaacgcgttcgtggggacaataaggaatacgaatattcggtcgagtgtcaggaagattcagcttgccctgccgctgaggagtcacttccgattgaagtgatggttgacgccgtgcacaaattaaagtatgaaaattacacgtcatctttctttatccgtgacattattaagcccgacccgccaaagaatctgcagcttaaacccctgaagaacagccgccaggtggaagtaagctgggaatatcctgacacctggtccactccgcattcgtatttctcgttgacgttttgtgttcaggtgcagggaaagagcaagcgcgaaaagaaggatcgcgtctttacagacaaaacgtccgcgacggttatttgtcgtaagaatgctagtatctctgttcgcgctcaggaccgttattactcatctagttggtcggagtgggcctcggttccctgctctgggggtggaggatcgggtggaggtggctcgggaggtggcggctcccgtaatttaccggtggctactcctgacccagggatgttcccgtgcttgcaccatagccaaaacttacttcgcgctgtcagcaacatgcttcagaaagcacgtcaaacgcttgagttttacccgtgtactagcgaagagatcgatcacgaggacattaccaaagacaaaacctccaccgtcgaggcctgccttccacttgaactgacgaaaaatgagtcatgcttaaattctcgtgaaacctccttcattactaacggatcgtgcctggcctcgcgcaagacttcgttcatgatggcattatgcttgtcgtctatttatgaagaccttaaaatgtatcaagtggagttcaagacgatgaatgcaaaacttcttatggacccgaagcgtcaaatcttcttagaccaaaacatgttggccgtgatcgatgaactgatgcaagccttgaattttaattcggaaactgtaccgcaaaaatcttctcttgaagaaccggatttctataagaccaaaattaaactttgtattttacttcacgctttccgcatccgtgcagtaactatcgaccgcgtaatgagttaccttaacgcctcgggtggcgagctcggtggcagtggtaagcctatccctaaccctctcctcggcctcgattctacgggatccggtcatcaccaccatcaccatcaccat

SEQ ID NO: 1255 - DNA, 1755 bp, Artificial Sequence
  Description of Artificial Sequence: Synthetic polynucleotide
atgaagcaggctctgcgcgtggcatttgggttcctgatcttatgggcgtccgtcttacacgcagtcgactataaggatgacgacgacaagcaattgggcggtggcatctgggagcttaagaaggacgtgtatgtagtggagttagactggtatccagatgcccccggagagatggtggtcttaacatgtgacactccagaggaggacgggattacctggacacttgaccagtcaagcgaggtattgggttctggaaagacgcttactattcaagtcaaagaatttggggatgccgggcagtatacatgtcacaagggcggcgaagttctgtcgcactccttacttttgttacacaaaaaagaagacggcatttggtccacagacatccttaaggaccaaaaggagccgaagaataagacgtttctgcgctgtgaagcgaagaactatagtggtcgctttacttgctggtggttgacgaccatttccactgatttaaccttttcggtaaagagttctcgcgggagttccgacccacagggcgtgacttgtggcgcagccacactttcggcggaacgcgttcgtggggacaataaggaatacgaatattcggtcgagtgtcaggaagattcagcttgccctgccgctgaggagtcacttccgattgaagtgatggttgacgccgtgcacaaattaaagtatgaaaattacacgtcatctttctttatccgtgacattattaagcccgacccgccaaagaatctgcagcttaaacccctgaagaacagccgccaggtggaagtaagctgggaatatcctgacacctggtccactccgcattcgtatttctcgttgacgttttgtgttcaggtgcagggaaagagcaagcgcgaaaagaaggatcgcgtctttacagacaaaacgtccgcgacggttatttgtcgtaagaatgctagtatctctgttcgcgctcaggaccgttattactcatctagttggtcggagtgggcctcggttccctgctctgggggtggaggatcgggtggaggtggctcgggaggtggcggctcccgtaatttaccggtggctactcctgacccagggatgttcccgtgcttgcaccatagccaaaacttacttcgcgctgtcagcaacatgcttcagaaagcacgtcaaacgcttgagttttacccgtgtactagcgaagagatcgatcacgaggacattaccaaagacaaaacctccaccgtcgaggcctgccttccacttgaactgacgaaaaatgagtcatgcttaaattctcgtgaaacctccttcattactaacggatcgtgcctggcctcgcgcaagacttcgttcatgatggcattatgcttgtcgtctatttatgaagaccttaaaatgtatcaagtggagttcaagacgatgaatgcaaaacttcttatggacccgaagcgtcaaatcttcttagaccaaaacatgttggccgtgatcgatgaactgatgcaagccttgaattttaattcggaaactgtaccgcaaaaatcttctcttgaagaaccggatttctataagaccaaaattaaactttgtattttacttcacgctttccgcatccgtgcagtaactatcgaccgcgtaatgagttaccttaacgcctcgggtggcgagctcggtggcagtggtaagcctatccctaaccctctcctcggcctcgattctacgggatccggtcatcaccaccatcaccatcaccat

SEQ ID NO: 1256 - DNA, 1770 bp, Artificial Sequence
  Description of Artificial Sequence: Synthetic polynucleotide
atgaaaatcaagacgggggcacgcattcttgccttgagcgccttgacaacgatgatgttcagtgcaagtgcattagcggtcgactataaggatgacgacgacaagcaattgggcggtggcatctgggagcttaagaaggacgtgtatgtagtggagttagactggtatccagatgcccccggagagatggtggtcttaacatgtgacactccagaggaggacgggattacctggacacttgaccagtcaagcgaggtattgggttctggaaagacgcttactattcaagtcaaagaatttggggatgccgggcagtatacatgtcacaagggcggcgaagttctgtcgcactccttacttttgttacacaaaaaagaagacggcatttggtccacagacatccttaaggaccaaaaggagccgaagaataagacgtttctgcgctgtgaagcgaagaactatagtggtcgctttacttgctggtggttgacgaccatttccactgatttaaccttttcggtaaagagttctcgcgggagttccgacccacagggcgtgacttgtggcgcagccacactttcggcggaacgcgttcgtggggacaataaggaatacgaatattcggtcgagtgtcaggaagattcagcttgccctgccgctgaggagtcacttccgattgaagtgatggttgacgccgtgcacaaattaaagtatgaaaattacacgtcatctttctttatccgtgacattattaagcccgacccgccaaagaatctgcagcttaaacccctgaagaacagccgccaggtggaagtaagctgggaatatcctgacacctggtccactccgcattcgtatttctcgttgacgttttgtgttcaggtgcagggaaagagcaagcgcgaaaagaaggatcgcgtctttacagacaaaacgtccgcgacggttatttgtcgtaagaatgctagtatctctgttcgcgctcaggaccgttattactcatctagttggtcggagtgggcctcggttccctgctctgggggtggaggatcgggtggaggtggctcgggaggtggcggctcccgtaatttaccggtggctactcctgacccagggatgttcccgtgcttgcaccatagccaaaacttacttcgcgctgtcagcaacatgcttcagaaagcacgtcaaacgcttgagttttacccgtgtactagcgaagagatcgatcacgaggacattaccaaagacaaaacctccaccgtcgaggcctgccttccacttgaactgacgaaaaatgagtcatgcttaaattctcgtgaaacctccttcattactaacggatcgtgcctggcctcgcgcaagacttcgttcatgatggcattatgcttgtcgtctatttatgaagaccttaaaatgtatcaagtggagttcaagacgatgaatgcaaaacttcttatggacccgaagcgtcaaatcttcttagaccaaaacatgttggccgtgatcgatgaactgatgcaagccttgaattttaattcggaaactgtaccgcaaaaatcttctcttgaagaaccggatttctataagaccaaaattaaactttgtattttacttcacgctttccgcatccgtgcagtaactatcgaccgcgtaatgagttaccttaacgcctcgggtggcgagctcggtggcagtggtaagcctatccctaaccctctcctcggcctcgattctacgggatccggtcatcaccaccatcaccatcaccat

SEQ ID NO: 1257 - DNA, 1761 bp, Artificial Sequence
  Description of Artificial Sequence: Synthetic polynucleotide
atgaataagaaagtcttgacattgtcggcggtcatggcctcgatgttgttcggggcagcagcccacgcagtcgactataaggatgacgacgacaagcaattgggcggtggcatctgggagcttaagaaggacgtgtatgtagtggagttagactggtatccagatgcccccggagagatggtggtcttaacatgtgacactccagaggaggacgggattacctggacacttgaccagtcaagcgaggtattgggttctggaaagacgcttactattcaagtcaaagaatttggggatgccgggcagtatacatgtcacaagggcggcgaagttctgtcgcactccttacttttgttacacaaaaaagaagacggcatttggtccacagacatccttaaggaccaaaaggagccgaagaataagacgtttctgcgctgtgaagcgaagaactatagtggtcgctttacttgctggtggttgacgaccatttccactgatttaaccttttcggtaaagagttctcgcgggagttccgacccacagggcgtgacttgtggcgcagccacactttcggcggaacgcgttcgtggggacaataaggaatacgaatattcggtcgagtgtcaggaagattcagcttgccctgccgctgaggagtcacttccgattgaagtgatggttgacgccgtgcacaaattaaagtatgaaaattacacgtcatctttctttatccgtgacattattaagcccgacccgccaaagaatctgcagcttaaacccctgaagaacagccgccaggtggaagtaagctgggaatatcctgacacctggtccactccgcattcgtatttctcgttgacgttttgtgttcaggtgcagggaaagagcaagcgcgaaaagaaggatcgcgtctttacagacaaaacgtccgcgacggttatttgtcgtaagaatgctagtatctctgttcgcgctcaggaccgttattactcatctagttggtcggagtgggcctcggttccctgctctgggggtggaggatcgggtggaggtggctcgggaggtggcggctcccgtaatttaccggtggctactcctgacccagggatgttcccgtgcttgcaccatagccaaaacttacttcgcgctgtcagcaacatgcttcagaaagcacgtcaaacgcttgagttttacccgtgtactagcgaagagatcgatcacgaggacattaccaaagacaaaacctccaccgtcgaggcctgccttccacttgaactgacgaaaaatgagtcatgcttaaattctcgtgaaacctccttcattactaacggatcgtgcctggcctcgcgcaagacttcgttcatgatggcattatgcttgtcgtctatttatgaagaccttaaaatgtatcaagtggagttcaagacgatgaatgcaaaacttcttatggacccgaagcgtcaaatcttcttagaccaaaacatgttggccgtgatcgatgaactgatgcaagccttgaattttaattcggaaactgtaccgcaaaaatcttctcttgaagaaccggatttctataagaccaaaattaaactttgtattttacttcacgctttccgcatccgtgcagtaactatcgaccgcgtaatgagttaccttaacgcctcgggtggcgagctcggtggcagtggtaagcctatccctaaccctctcctcggcctcgattctacgggatccggtcatcaccaccatcaccatcaccat

SEQ ID NO: 1258 - DNA, 1758 bp, Artificial Sequence
  Description of Artificial Sequence: Synthetic polynucleotide
atgatgaagcgtaacatcttagccgttattgtccccgcattgcttgtggccgggacggctaacgcagtcgactataaggatgacgacgacaagcaattgggcggtggcatctgggagcttaagaaggacgtgtatgtagtggagttagactggtatccagatgcccccggagagatggtggtcttaacatgtgacactccagaggaggacgggattacctggacacttgaccagtcaagcgaggtattgggttctggaaagacgcttactattcaagtcaaagaatttggggatgccgggcagtatacatgtcacaagggcggcgaagttctgtcgcactccttacttttgttacacaaaaaagaagacggcatttggtccacagacatccttaaggaccaaaaggagccgaagaataagacgtttctgcgctgtgaagcgaagaactatagtggtcgctttacttgctggtggttgacgaccatttccactgatttaaccttttcggtaaagagttctcgcgggagttccgacccacagggcgtgacttgtggcgcagccacactttcggcggaacgcgttcgtggggacaataaggaatacgaatattcggtcgagtgtcaggaagattcagcttgccctgccgctgaggagtcacttccgattgaagtgatggttgacgccgtgcacaaattaaagtatgaaaattacacgtcatctttctttatccgtgacattattaagcccgacccgccaaagaatctgcagcttaaacccctgaagaacagccgccaggtggaagtaagctgggaatatcctgacacctggtccactccgcattcgtatttctcgttgacgttttgtgttcaggtgcagggaaagagcaagcgcgaaaagaaggatcgcgtctttacagacaaaacgtccgcgacggttatttgtcgtaagaatgctagtatctctgttcgcgctcaggaccgttattactcatctagttggtcggagtgggcctcggttccctgctctgggggtggaggatcgggtggaggtggctcgggaggtggcggctcccgtaatttaccggtggctactcctgacccagggatgttcccgtgcttgcaccatagccaaaacttacttcgcgctgtcagcaacatgcttcagaaagcacgtcaaacgcttgagttttacccgtgtactagcgaagagatcgatcacgaggacattaccaaagacaaaacctccaccgtcgaggcctgccttccacttgaactgacgaaaaatgagtcatgcttaaattctcgtgaaacctccttcattactaacggatcgtgcctggcctcgcgcaagacttcgttcatgatggcattatgcttgtcgtctatttatgaagaccttaaaatgtatcaagtggagttcaagacgatgaatgcaaaacttcttatggacccgaagcgtcaaatcttcttagaccaaaacatgttggccgtgatcgatgaactgatgcaagccttgaattttaattcggaaactgtaccgcaaaaatcttctcttgaagaaccggatttctataagaccaaaattaaactttgtattttacttcacgctttccgcatccgtgcagtaactatcgaccgcgtaatgagttaccttaacgcctcgggtggcgagctcggtggcagtggtaagcctatccctaaccctctcctcggcctcgattctacgggatccggtcatcaccaccatcaccatcaccat

SEQ ID NO: 1259 - DNA, 1755 bp, Artificial Sequence
  Description of Artificial Sequence: Synthetic polynucleotide
atgaagaagactgccatcgctattgccgtcgcccttgcgggtttcgcaaccgtggcgcaagcagtcgactataaggatgacgacgacaagcaattgggcggtggcatctgggagcttaagaaggacgtgtatgtagtggagttagactggtatccagatgcccccggagagatggtggtcttaacatgtgacactccagaggaggacgggattacctggacacttgaccagtcaagcgaggtattgggttctggaaagacgcttactattcaagtcaaagaatttggggatgccgggcagtatacatgtcacaagggcggcgaagttctgtcgcactccttacttttgttacacaaaaaagaagacggcatttggtccacagacatccttaaggaccaaaaggagccgaagaataagacgtttctgcgctgtgaagcgaagaactatagtggtcgctttacttgctggtggttgacgaccatttccactgatttaaccttttcggtaaagagttctcgcgggagttccgacccacagggcgtgacttgtggcgcagccacactttcggcggaacgcgttcgtggggacaataaggaatacgaatattcggtcgagtgtcaggaagattcagcttgccctgccgctgaggagtcacttccgattgaagtgatggttgacgccgtgcacaaattaaagtatgaaaattacacgtcatctttctttatccgtgacattattaagcccgacccgccaaagaatctgcagcttaaacccctgaagaacagccgccaggtggaagtaagctgggaatatcctgacacctggtccactccgcattcgtatttctcgttgacgttttgtgttcaggtgcagggaaagagcaagcgcgaaaagaaggatcgcgtctttacagacaaaacgtccgcgacggttatttgtcgtaagaatgctagtatctctgttcgcgctcaggaccgttattactcatctagttggtcggagtgggcctcggttccctgctctgggggtggaggatcgggtggaggtggctcgggaggtggcggctcccgtaatttaccggtggctactcctgacccagggatgttcccgtgcttgcaccatagccaaaacttacttcgcgctgtcagcaacatgcttcagaaagcacgtcaaacgcttgagttttacccgtgtactagcgaagagatcgatcacgaggacattaccaaagacaaaacctccaccgtcgaggcctgccttccacttgaactgacgaaaaatgagtcatgcttaaattctcgtgaaacctccttcattactaacggatcgtgcctggcctcgcgcaagacttcgttcatgatggcattatgcttgtcgtctatttatgaagaccttaaaatgtatcaagtggagttcaagacgatgaatgcaaaacttcttatggacccgaagcgtcaaatcttcttagaccaaaacatgttggccgtgatcgatgaactgatgcaagccttgaattttaattcggaaactgtaccgcaaaaatcttctcttgaagaaccggatttctataagaccaaaattaaactttgtattttacttcacgctttccgcatccgtgcagtaactatcgaccgcgtaatgagttaccttaacgcctcgggtggcgagctcggtggcagtggtaagcctatccctaaccctctcctcggcctcgattctacgggatccggtcatcaccaccatcaccatcaccat

SEQ ID NO: 1260 - DNA, 1746 bp, Artificial Sequence
  Description of Artificial Sequence: Synthetic polynucleotide
atgcgcgtgttattgttcttgctgctgagcttgtttatgttaccagctttcagtgtcgactataaggatgacgacgacaagcaattgggcggtggcatctgggagcttaagaaggacgtgtatgtagtggagttagactggtatccagatgcccccggagagatggtggtcttaacatgtgacactccagaggaggacgggattacctggacacttgaccagtcaagcgaggtattgggttctggaaagacgcttactattcaagtcaaagaatttggggatgccgggcagtatacatgtcacaagggcggcgaagttctgtcgcactccttacttttgttacacaaaaaagaagacggcatttggtccacagacatccttaaggaccaaaaggagccgaagaataagacgtttctgcgctgtgaagcgaagaactatagtggtcgctttacttgctggtggttgacgaccatttccactgatttaaccttttcggtaaagagttctcgcgggagttccgacccacagggcgtgacttgtggcgcagccacactttcggcggaacgcgttcgtggggacaataaggaatacgaatattcggtcgagtgtcaggaagattcagcttgccctgccgctgaggagtcacttccgattgaagtgatggttgacgccgtgcacaaattaaagtatgaaaattacacgtcatctttctttatccgtgacattattaagcccgacccgccaaagaatctgcagcttaaacccctgaagaacagccgccaggtggaagtaagctgggaatatcctgacacctggtccactccgcattcgtatttctcgttgacgttttgtgttcaggtgcagggaaagagcaagcgcgaaaagaaggatcgcgtctttacagacaaaacgtccgcgacggttatttgtcgtaagaatgctagtatctctgttcgcgctcaggaccgttattactcatctagttggtcggagtgggcctcggttccctgctctgggggtggaggatcgggtggaggtggctcgggaggtggcggctcccgtaatttaccggtggctactcctgacccagggatgttcccgtgcttgcaccatagccaaaacttacttcgcgctgtcagcaacatgcttcagaaagcacgtcaaacgcttgagttttacccgtgtactagcgaagagatcgatcacgaggacattaccaaagacaaaacctccaccgtcgaggcctgccttccacttgaactgacgaaaaatgagtcatgcttaaattctcgtgaaacctccttcattactaacggatcgtgcctggcctcgcgcaagacttcgttcatgatggcattatgcttgtcgtctatttatgaagaccttaaaatgtatcaagtggagttcaagacgatgaatgcaaaacttcttatggacccgaagcgtcaaatcttcttagaccaaaacatgttggccgtgatcgatgaactgatgcaagccttgaattttaattcggaaactgtaccgcaaaaatcttctcttgaagaaccggatttctataagaccaaaattaaactttgtattttacttcacgctttccgcatccgtgcagtaactatcgaccgcgtaatgagttaccttaacgcctcgggtggcgagctcggtggcagtggtaagcctatccctaaccctctcctcggcctcgattctacgggatccggtcatcaccaccatcaccatcaccat

SEQ ID NO: 1261 - DNA, 1767 bp, Artificial Sequence
  Description of Artificial Sequence: Synthetic polynucleotide
atgatgattaccttacgcaagttgccccttgcggtagccgttgctgctggtgtgatgtccgcgcaagcaatggctgtcgactataaggatgacgacgacaagcaattgggcggtggcatctgggagcttaagaaggacgtgtatgtagtggagttagactggtatccagatgcccccggagagatggtggtcttaacatgtgacactccagaggaggacgggattacctggacacttgaccagtcaagcgaggtattgggttctggaaagacgcttactattcaagtcaaagaatttggggatgccgggcagtatacatgtcacaagggcggcgaagttctgtcgcactccttacttttgttacacaaaaaagaagacggcatttggtccacagacatccttaaggaccaaaaggagccgaagaataagacgtttctgcgctgtgaagcgaagaactatagtggtcgctttacttgctggtggttgacgaccatttccactgatttaaccttttcggtaaagagttctcgcgggagttccgacccacagggcgtgacttgtggcgcagccacactttcggcggaacgcgttcgtggggacaataaggaatacgaatattcggtcgagtgtcaggaagattcagcttgccctgccgctgaggagtcacttccgattgaagtgatggttgacgccgtgcacaaattaaagtatgaaaattacacgtcatctttctttatccgtgacattattaagcccgacccgccaaagaatctgcagcttaaacccctgaagaacagccgccaggtggaagtaagctgggaatatcctgacacctggtccactccgcattcgtatttctcgttgacgttttgtgttcaggtgcagggaaagagcaagcgcgaaaagaaggatcgcgtctttacagacaaaacgtccgcgacggttatttgtcgtaagaatgctagtatctctgttcgcgctcaggaccgttattactcatctagttggtcggagtgggcctcggttccctgctctgggggtggaggatcgggtggaggtggctcgggaggtggcggctcccgtaatttaccggtggctactcctgacccagggatgttcccgtgcttgcaccatagccaaaacttacttcgcgctgtcagcaacatgcttcagaaagcacgtcaaacgcttgagttttacccgtgtactagcgaagagatcgatcacgaggacattaccaaagacaaaacctccaccgtcgaggcctgccttccacttgaactgacgaaaaatgagtcatgcttaaattctcgtgaaacctccttcattactaacggatcgtgcctggcctcgcgcaagacttcgttcatgatggcattatgcttgtcgtctatttatgaagaccttaaaatgtatcaagtggagttcaagacgatgaatgcaaaacttcttatggacccgaagcgtcaaatcttcttagaccaaaacatgttggccgtgatcgatgaactgatgcaagccttgaattttaattcggaaactgtaccgcaaaaatcttctcttgaagaaccggatttctataagaccaaaattaaactttgtattttacttcacgctttccgcatccgtgcagtaactatcgaccgcgtaatgagttaccttaacgcctcgggtggcgagctcggtggcagtggtaagcctatccctaaccctctcctcggcctcgattctacgggatccggtcatcaccaccatcaccatcaccat

SEQ ID NO: 1262 - DNA, 1758 bp, Artificial Sequence
  Description of Artificial Sequence: Synthetic polynucleotide
atgaaatatcttcttccaacggctgctgctggtttattgcttcttgccgcccagcctgcgatggctgtcgactataaggatgacgacgacaagcaattgggcggtggcatctgggagcttaagaaggacgtgtatgtagtggagttagactggtatccagatgcccccggagagatggtggtcttaacatgtgacactccagaggaggacgggattacctggacacttgaccagtcaagcgaggtattgggttctggaaagacgcttactattcaagtcaaagaatttggggatgccgggcagtatacatgtcacaagggcggcgaagttctgtcgcactccttacttttgttacacaaaaaagaagacggcatttggtccacagacatccttaaggaccaaaaggagccgaagaataagacgtttctgcgctgtgaagcgaagaactatagtggtcgctttacttgctggtggttgacgaccatttccactgatttaaccttttcggtaaagagttctcgcgggagttccgacccacagggcgtgacttgtggcgcagccacactttcggcggaacgcgttcgtggggacaataaggaatacgaatattcggtcgagtgtcaggaagattcagcttgccctgccgctgaggagtcacttccgattgaagtgatggttgacgccgtgcacaaattaaagtatgaaaattacacgtcatctttctttatccgtgacattattaagcccgacccgccaaagaatctgcagcttaaacccctgaagaacagccgccaggtggaagtaagctgggaatatcctgacacctggtccactccgcattcgtatttctcgttgacgttttgtgttcaggtgcagggaaagagcaagcgcgaaaagaaggatcgcgtctttacagacaaaacgtccgcgacggttatttgtcgtaagaatgctagtatctctgttcgcgctcaggaccgttattactcatctagttggtcggagtgggcctcggttccctgctctgggggtggaggatcgggtggaggtggctcgggaggtggcggctcccgtaatttaccggtggctactcctgacccagggatgttcccgtgcttgcaccatagccaaaacttacttcgcgctgtcagcaacatgcttcagaaagcacgtcaaacgcttgagttttacccgtgtactagcgaagagatcgatcacgaggacattaccaaagacaaaacctccaccgtcgaggcctgccttccacttgaactgacgaaaaatgagtcatgcttaaattctcgtgaaacctccttcattactaacggatcgtgcctggcctcgcgcaagacttcgttcatgatggcattatgcttgtcgtctatttatgaagaccttaaaatgtatcaagtggagttcaagacgatgaatgcaaaacttcttatggacccgaagcgtcaaatcttcttagaccaaaacatgttggccgtgatcgatgaactgatgcaagccttgaattttaattcggaaactgtaccgcaaaaatcttctcttgaagaaccggatttctataagaccaaaattaaactttgtattttacttcacgctttccgcatccgtgcagtaactatcgaccgcgtaatgagttaccttaacgcctcgggtggcgagctcggtggcagtggtaagcctatccctaaccctctcctcggcctcgattctacgggatccggtcatcaccaccatcaccatcaccat

SEQ ID NO: 1263 - DNA, 1554 bp, Artificial Sequence
  Description of Artificial Sequence: Synthetic polynucleotide
atctgggagcttaagaaggacgtgtatgtagtggagttagactggtatccagatgcccccggagagatggtggtcttaacatgtgacactccagaggaggacgggattacctggacacttgaccagtcaagcgaggtattgggttctggaaagacgcttactattcaagtcaaagaatttggggatgccgggcagtatacatgtcacaagggcggcgaagttctgtcgcactccttacttttgttacacaaaaaagaagacggcatttggtccacagacatccttaaggaccaaaaggagccgaagaataagacgtttctgcgctgtgaagcgaagaactatagtggtcgctttacttgctggtggttgacgaccatttccactgatttaaccttttcggtaaagagttctcgcgggagttccgacccacagggcgtgacttgtggcgcagccacactttcggcggaacgcgttcgtggggacaataaggaatacgaatattcggtcgagtgtcaggaagattcagcttgccctgccgctgaggagtcacttccgattgaagtgatggttgacgccgtgcacaaattaaagtatgaaaattacacgtcatctttctttatccgtgacattattaagcccgacccgccaaagaatctgcagcttaaacccctgaagaacagccgccaggtggaagtaagctgggaatatcctgacacctggtccactccgcattcgtatttctcgttgacgttttgtgttcaggtgcagggaaagagcaagcgcgaaaagaaggatcgcgtctttacagacaaaacgtccgcgacggttatttgtcgtaagaatgctagtatctctgttcgcgctcaggaccgttattactcatctagttggtcggagtgggcctcggttccctgctctgggggtggaggatcgggtggaggtggctcgggaggtggcggctcccgtaatttaccggtggctactcctgacccagggatgttcccgtgcttgcaccatagccaaaacttacttcgcgctgtcagcaacatgcttcagaaagcacgtcaaacgcttgagttttacccgtgtactagcgaagagatcgatcacgaggacattaccaaagacaaaacctccaccgtcgaggcctgccttccacttgaactgacgaaaaatgagtcatgcttaaattctcgtgaaacctccttcattactaacggatcgtgcctggcctcgcgcaagacttcgttcatgatggcattatgcttgtcgtctatttatgaagaccttaaaatgtatcaagtggagttcaagacgatgaatgcaaaacttcttatggacccgaagcgtcaaatcttcttagaccaaaacatgttggccgtgatcgatgaactgatgcaagccttgaattttaattcggaaactgtaccgcaaaaatcttctcttgaagaaccggatttctataagaccaaaattaaactttgtattttacttcacgctttccgcatccgtgcagtaactatcgaccgcgtaatgagttaccttaacgcctcg

SEQ ID NO: 1264 - protein, 597 aa, Artificial Sequence
  Description of Artificial Sequence: Synthetic polypeptide
MGYKMNISSLRKAFIFMGAVAALSLVNAQSALAVDYKDDDDKQLGGGIWELKKDVYVVELDWYPDAPGEMVVLTCDTPEEDGITWTLDQSSEVLGSGKTLTIQVKEFGDAGQYTCHKGGEVLSHSLLLLHKKEDGIWSTDILKDQKEPKNKTFLRCEAKNYSGRFTCWWLTTISTDLTFSVKSSRGSSDPQGVTCGAATLSAERVRGDNKEYEYSVECQEDSACPAAEESLPIEVMVDAVHKLKYENYTSSFFIRDIIKPDPPKNLQLKPLKNSRQVEVSWEYPDTWSTPHSYFSLTFCVQVQGKSKREKKDRVFTDKTSATVICRKNASISVRAQDRYYSSSWSEWASVPCSGGGGSGGGGSGGGGSRNLPVATPDPGMFPCLHHSQNLLRAVSNMLQKARQTLEFYPCTSEEIDHEDITKDKTSTVEACLPLELTKNESCLNSRETSFITNGSCLASRKTSFMMALCLSSIYEDLKMYQVEFKTMNAKLLMDPKRQIFLDQNMLAVIDELMQALNFNSETVPQKSSLEEPDFYKTKIKLCILLHAFRIRAVTIDRVMSYLNASGGELGGSGKPIPNPLLGLDSTGSGHHHHHHHH

SEQ ID NO: 1265 - protein, 583 aa, Artificial Sequence
  Description of Artificial Sequence: Synthetic polypeptide
MKKIWLALAGLVLAFSASAVDYKDDDDKQLGGGIWELKKDVYVVELDWYPDAPGEMVVLTCDTPEEDGITWTLDQSSEVLGSGKTLTIQVKEFGDAGQYTCHKGGEVLSHSLLLLHKKEDGIWSTDILKDQKEPKNKTFLRCEAKNYSGRFTCWWLTTISTDLTFSVKSSRGSSDPQGVTCGAATLSAERVRGDNKEYEYSVECQEDSACPAAEESLPIEVMVDAVHKLKYENYTSSFFIRDIIKPDPPKNLQLKPLKNSRQVEVSWEYPDTWSTPHSYFSLTFCVQVQGKSKREKKDRVFTDKTSATVICRKNASISVRAQDRYYSSSWSEWASVPCSGGGGSGGGGSGGGGSRNLPVATPDPGMFPCLHHSQNLLRAVSNMLQKARQTLEFYPCTSEEIDHEDITKDKTSTVEACLPLELTKNESCLNSRETSFITNGSCLASRKTSFMMALCLSSIYEDLKMYQVEFKTMNAKLLMDPKRQIFLDQNMLAVIDELMQALNFNSETVPQKSSLEEPDFYKTKIKLCILLHAFRIRAVTIDRVMSYLNASGGELGGSGKPIPNPLLGLDSTGSGHHHHHHHH

SEQ ID NO: 1266 - protein, 585 aa, Artificial Sequence
  Description of Artificial Sequence: Synthetic polypeptide
MKQSTIALALLPLLFTPVTKAVDYKDDDDKQLGGGIWELKKDVYVVELDWYPDAPGEMVVLTCDTPEEDGITWTLDQSSEVLGSGKTLTIQVKEFGDAGQYTCHKGGEVLSHSLLLLHKKEDGIWSTDILKDQKEPKNKTFLRCEAKNYSGRFTCWWLTTISTDLTFSVKSSRGSSDPQGVTCGAATLSAERVRGDNKEYEYSVECQEDSACPAAEESLPIEVMVDAVHKLKYENYTSSFFIRDIIKPDPPKNLQLKPLKNSRQVEVSWEYPDTWSTPHSYFSLTFCVQVQGKSKREKKDRVFTDKTSATVICRKNASISVRAQDRYYSSSWSEWASVPCSGGGGSGGGGSGGGGSRNLPVATPDPGMFPCLHHSQNLLRAVSNMLQKARQTLEFYPCTSEEIDHEDITKDKTSTVEACLPLELTKNESCLNSRETSFITNGSCLASRKTSFMMALCLSSIYEDLKMYQVEFKTMNAKLLMDPKRQIFLDQNMLAVIDELMQALNFNSETVPQKSSLEEPDFYKTKIKLCILLHAFRIRAVTIDRVMSYLNASGGELGGSGKPIPNPLLGLDSTGSGHHHHHHHH

SEQ ID NO: 1267 - protein, 585 aa, Artificial Sequence
  Description of Artificial Sequence: Synthetic polypeptide
MKQALRVAFGFLILWASVLHAVDYKDDDDKQLGGGIWELKKDVYVVELDWYPDAPGEMVVLTCDTPEEDGITWTLDQSSEVLGSGKTLTIQVKEFGDAGQYTCHKGGEVLSHSLLLLHKKEDGIWSTDILKDQKEPKNKTFLRCEAKNYSGRFTCWWLTTISTDLTFSVKSSRGSSDPQGVTCGAATLSAERVRGDNKEYEYSVECQEDSACPAAEESLPIEVMVDAVHKLKYENYTSSFFIRDIIKPDPPKNLQLKPLKNSRQVEVSWEYPDTWSTPHSYFSLTFCVQVQGKSKREKKDRVFTDKTSATVICRKNASISVRAQDRYYSSSWSEWASVPCSGGGGSGGGGSGGGGSRNLPVATPDPGMFPCLHHSQNLLRAVSNMLQKARQTLEFYPCTSEEIDHEDITKDKTSTVEACLPLELTKNESCLNSRETSFITNGSCLASRKTSFMMALCLSSIYEDLKMYQVEFKTMNAKLLMDPKRQIFLDQNMLAVIDELMQALNFNSETVPQKSSLEEPDFYKTKIKLCILLHAFRIRAVTIDRVMSYLNASGGELGGSGKPIPNPLLGLDSTGSGHHHHHHHH

SEQ ID NO: 1268 - protein, 590 aa, Artificial Sequence
  Description of Artificial Sequence: Synthetic polypeptide
MKIKTGARILALSALTTMMFSASALAVDYKDDDDKQLGGGIWELKKDVYVVELDWYPDAPGEMVVLTCDTPEEDGITWTLDQSSEVLGSGKTLTIQVKEFGDAGQYTCHKGGEVLSHSLLLLHKKEDGIWSTDILKDQKEPKNKTFLRCEAKNYSGRFTCWWLTTISTDLTFSVKSSRGSSDPQGVTCGAATLSAERVRGDNKEYEYSVECQEDSACPAAEESLPIEVMVDAVHKLKYENYTSSFFIRDIIKPDPPKNLQLKPLKNSRQVEVSWEYPDTWSTPHSYFSLTFCVQVQGKSKREKKDRVFTDKTSATVICRKNASISVRAQDRYYSSSWSEWASVPCSGGGGSGGGGSGGGGSRNLPVATPDPGMFPCLHHSQNLLRAVSNMLQKARQTLEFYPCTSEEIDHEDITKDKTSTVEACLPLELTKNESCLNSRETSFITNGSCLASRKTSFMMALCLSSIYEDLKMYQVEFKTMNAKLLMDPKRQIFLDQNMLAVIDELMQALNFNSETVPQKSSLEEPDFYKTKIKLCILLHAFRIRAVTIDRVMSYLNASGGELGGSGKPIPNPLLGLDSTGSGHHHHHHHH

SEQ ID NO: 1269 - protein, 587 aa, Artificial Sequence
  Description of Artificial Sequence: Synthetic polypeptide
MNKKVLTLSAVMASMLFGAAAHAVDYKDDDDKQLGGGIWELKKDVYVVELDWYPDAPGEMVVLTCDTPEEDGITWTLDQSSEVLGSGKTLTIQVKEFGDAGQYTCHKGGEVLSHSLLLLHKKEDGIWSTDILKDQKEPKNKTFLRCEAKNYSGRFTCWWLTTISTDLTFSVKSSRGSSDPQGVTCGAATLSAERVRGDNKEYEYSVECQEDSACPAAEESLPIEVMVDAVHKLKYENYTSSFFIRDIIKPDPPKNLQLKPLKNSRQVEVSWEYPDTWSTPHSYFSLTFCVQVQGKSKREKKDRVFTDKTSATVICRKNASISVRAQDRYYSSSWSEWASVPCSGGGGSGGGGSGGGGSRNLPVATPDPGMFPCLHHSQNLLRAVSNMLQKARQTLEFYPCTSEEIDHEDITKDKTSTVEACLPLELTKNESCLNSRETSFITNGSCLASRKTSFMMALCLSSIYEDLKMYQVEFKTMNAKLLMDPKRQIFLDQNMLAVIDELMQALNFNSETVPQKSSLEEPDFYKTKIKLCILLHAFRIRAVTIDRVMSYLNASGGELGGSGKPIPNPLLGLDSTGSGHHHHHHHH

SEQ ID NO: 1270 - protein, 586 aa, Artificial Sequence
  Description of Artificial Sequence: Synthetic polypeptide
MMKRNILAVIVPALLVAGTANAVDYKDDDDKQLGGGIWELKKDVYVVELDWYPDAPGEMVVLTCDTPEEDGITWTLDQSSEVLGSGKTLTIQVKEFGDAGQYTCHKGGEVLSHSLLLLHKKEDGIWSTDILKDQKEPKNKTFLRCEAKNYSGRFTCWWLTTISTDLTFSVKSSRGSSDPQGVTCGAATLSAERVRGDNKEYEYSVECQEDSACPAAEESLPIEVMVDAVHKLKYENYTSSFFIRDIIKPDPPKNLQLKPLKNSRQVEVSWEYPDTWSTPHSYFSLTFCVQVQGKSKREKKDRVFTDKTSATVICRKNASISVRAQDRYYSSSWSEWASVPCSGGGGSGGGGSGGGGSRNLPVATPDPGMFPCLHHSQNLLRAVSNMLQKARQTLEFYPCTSEEIDHEDITKDKTSTVEACLPLELTKNESCLNSRETSFITNGSCLASRKTSFMMALCLSSIYEDLKMYQVEFKTMNAKLLMDPKRQIFLDQNMLAVIDELMQALNFNSETVPQKSSLEEPDFYKTKIKLCILLHAFRIRAVTIDRVMSYLNASGGELGGSGKPIPNPLLGLDSTGSGHHHHHHHH

SEQ ID NO: 1271 - protein, 585 aa, Artificial Sequence
  Description of Artificial Sequence: Synthetic polypeptide
MKKTAIAIAVALAGFATVAQAVDYKDDDDKQLGGGIWELKKDVYVVELDWYPDAPGEMVVLTCDTPEEDGITWTLDQSSEVLGSGKTLTIQVKEFGDAGQYTCHKGGEVLSHSLLLLHKKEDGIWSTDILKDQKEPKNKTFLRCEAKNYSGRFTCWWLTTISTDLTFSVKSSRGSSDPQGVTCGAATLSAERVRGDNKEYEYSVECQEDSACPAAEESLPIEVMVDAVHKLKYENYTSSFFIRDIIKPDPPKNLQLKPLKNSRQVEVSWEYPDTWSTPHSYFSLTFCVQVQGKSKREKKDRVFTDKTSATVICRKNASISVRAQDRYYSSSWSEWASVPCSGGGGSGGGGSGGGGSRNLPVATPDPGMFPCLHHSQNLLRAVSNMLQKARQTLEFYPCTSEEIDHEDITKDKTSTVEACLPLELTKNESCLNSRETSFITNGSCLASRKTSFMMALCLSSIYEDLKMYQVEFKTMNAKLLMDPKRQIFLDQNMLAVIDELMQALNFNSETVPQKSSLEEPDFYKTKIKLCILLHAFRIRAVTIDRVMSYLNASGGELGGSGKPIPNPLLGLDSTGSGHHHHHHHH

SEQ ID NO: 1272 - protein, 582 aa, Artificial Sequence
  Description of Artificial Sequence: Synthetic polypeptide
MRVLLFLLLSLFMLPAFSVDYKDDDDKQLGGGIWELKKDVYVVELDWYPDAPGEMVVLTCDTPEEDGITWTLDQSSEVLGSGKTLTIQVKEFGDAGQYTCHKGGEVLSHSLLLLHKKEDGIWSTDILKDQKEPKNKTFLRCEAKNYSGRFTCWWLTTISTDLTFSVKSSRGSSDPQGVTCGAATLSAERVRGDNKEYEYSVECQEDSACPAAEESLPIEVMVDAVHKLKYENYTSSFFIRDIIKPDPPKNLQLKPLKNSRQVEVSWEYPDTWSTPHSYFSLTFCVQVQGKSKREKKDRVFTDKTSATVICRKNASISVRAQDRYYSSSWSEWASVPCSGGGGSGGGGSGGGGSRNLPVATPDPGMFPCLHHSQNLLRAVSNMLQKARQTLEFYPCTSEEIDHEDITKDKTSTVEACLPLELTKNESCLNSRETSFITNGSCLASRKTSFMMALCLSSIYEDLKMYQVEFKTMNAKLLMDPKRQIFLDQNMLAVIDELMQALNFNSETVPQKSSLEEPDFYKTKIKLCILLHAFRIRAVTIDRVMSYLNASGGELGGSGKPIPNPLLGLDSTGSGHHHHHHHH

SEQ ID NO: 1273 - protein, 589 aa, Artificial Sequence
  Description of Artificial Sequence: Synthetic polypeptide
MMITLRKLPLAVAVAAGVMSAQAMAVDYKDDDDKQLGGGIWELKKDVYVVELDWYPDAPGEMVVLTCDTPEEDGITWTLDQSSEVLGSGKTLTIQVKEFGDAGQYTCHKGGEVLSHSLLLLHKKEDGIWSTDILKDQKEPKNKTFLRCEAKNYSGRFTCWWLTTISTDLTFSVKSSRGSSDPQGVTCGAATLSAERVRGDNKEYEYSVECQEDSACPAAEESLPIEVMVDAVHKLKYENYTSSFFIRDIIKPDPPKNLQLKPLKNSRQVEVSWEYPDTWSTPHSYFSLTFCVQVQGKSKREKKDRVFTDKTSATVICRKNASISVRAQDRYYSSSWSEWASVPCSGGGGSGGGGSGGGGSRNLPVATPDPGMFPCLHHSQNLLRAVSNMLQKARQTLEFYPCTSEEIDHEDITKDKTSTVEACLPLELTKNESCLNSRETSFITNGSCLASRKTSFMMALCLSSIYEDLKMYQVEFKTMNAKLLMDPKRQIFLDQNMLAVIDELMQALNFNSETVPQKSSLEEPDFYKTKIKLCILLHAFRIRAVTIDRVMSYLNASGGELGGSGKPIPNPLLGLDSTGSGHHHHHHHH

SEQ ID NO: 1274 - protein, 586 aa, Artificial Sequence
  Description of Artificial Sequence: Synthetic polypeptide
MKYLLPTAAAGLLLLAAQPAMAVDYKDDDDKQLGGGIWELKKDVYVVELDWYPDAPGEMVVLTCDTPEEDGITWTLDQSSEVLGSGKTLTIQVKEFGDAGQYTCHKGGEVLSHSLLLLHKKEDGIWSTDILKDQKEPKNKTFLRCEAKNYSGRFTCWWLTTISTDLTFSVKSSRGSSDPQGVTCGAATLSAERVRGDNKEYEYSVECQEDSACPAAEESLPIEVMVDAVHKLKYENYTSSFFIRDIIKPDPPKNLQLKPLKNSRQVEVSWEYPDTWSTPHSYFSLTFCVQVQGKSKREKKDRVFTDKTSATVICRKNASISVRAQDRYYSSSWSEWASVPCSGGGGSGGGGSGGGGSRNLPVATPDPGMFPCLHHSQNLLRAVSNMLQKARQTLEFYPCTSEEIDHEDITKDKTSTVEACLPLELTKNESCLNSRETSFITNGSCLASRKTSFMMALCLSSIYEDLKMYQVEFKTMNAKLLMDPKRQIFLDQNMLAVIDELMQALNFNSETVPQKSSLEEPDFYKTKIKLCILLHAFRIRAVTIDRVMSYLNASGGELGGSGKPIPNPLLGLDSTGSGHHHHHHHH

SEQ ID NO: 1275 - protein, 518 aa, Artificial Sequence
  Description of Artificial Sequence: Synthetic polypeptide
IWELKKDVYVVELDWYPDAPGEMVVLTCDTPEEDGITWTLDQSSEVLGSGKTLTIQVKEFGDAGQYTCHKGGEVLSHSLLLLHKKEDGIWSTDILKDQKEPKNKTFLRCEAKNYSGRFTCWWLTTISTDLTFSVKSSRGSSDPQGVTCGAATLSAERVRGDNKEYEYSVECQEDSACPAAEESLPIEVMVDAVHKLKYENYTSSFFIRDIIKPDPPKNLQLKPLKNSRQVEVSWEYPDTWSTPHSYFSLTFCVQVQGKSKREKKDRVFTDKTSATVICRKNASISVRAQDRYYSSSWSEWASVPCSGGGGSGGGGSGGGGSRNLPVATPDPGMFPCLHHSQNLLRAVSNMLQKARQTLEFYPCTSEEIDHEDITKDKTSTVEACLPLELTKNESCLNSRETSFITNGSCLASRKTSFMMALCLSSIYEDLKMYQVEFKTMNAKLLMDPKRQIFLDQNMLAVIDELMQALNFNSETVPQKSSLEEPDFYKTKIKLCILLHAFRIRAVTIDRVMSYLNAS

SEQ ID NO: 1276 - DNA, 711 bp, Artificial Sequence
  Description of Artificial Sequence: Synthetic polynucleotide
atggggtacaaaatgaacattagctcgcttcgcaaagcattcatttttatgggggctgttgcagctttaagccttgtcaatgcccagtcagcgcttgccatgatcacttgtccgccccccatgtctgtggaacacgcggatatttgggtaaagagctactcactgtacagccgtgaacgttatatttgtaactccggcttcaaacgcaaagcaggaacttcatcactgacggagtgtgttttaaataaagctactaacgtcgcgcactggactactccctcattgaagtgcatccgtgatcctgctctgggtggcgggggtagcggcgggggtggaagcgggggtggagggtctggaggaggtgggtctaactgggtgaatgttatctcagatttaaagaaaattgaagacctgatccaatctatgcacatcgacgctactctgtatacagaatcagatgtacatccttcgtgtaaagtgaccgcgatgaagtgttttttgcttgagctgcaagtaatttcccttgagtccggggacgcttcaatccatgacacggtcgagaacctgatcattctggcaaacaatagtttatcatcgaacggtaatgttaccgaatcgggttgcaaagaatgcgaagagttagaggaaaagaacattaaagaatttttgcaatccttcgttcacattgtgcagatgttcattaatacatcg

SEQ ID NO: 1277 - DNA, 666 bp, Artificial Sequence
  Description of Artificial Sequence: Synthetic polynucleotide
atgcgcgtgttattgttcttgctgctgagcttgtttatgttaccagctttcagtatgatcacttgtccgccccccatgtctgtggaacacgcggatatttgggtaaagagctactcactgtacagccgtgaacgttatatttgtaactccggcttcaaacgcaaagcaggaacttcatcactgacggagtgtgttttaaataaagctactaacgtcgcgcactggactactccctcattgaagtgcatccgtgatcctgctctgggtggcgggggtagcggcgggggtggaagcgggggtggagggtctggaggaggtgggtctaactgggtgaatgttatctcagatttaaagaaaattgaagacctgatccaatctatgcacatcgacgctactctgtatacagaatcagatgtacatccttcgtgtaaagtgaccgcgatgaagtgttttttgcttgagctgcaagtaatttcccttgagtccggggacgcttcaatccatgacacggtcgagaacctgatcattctggcaaacaatagtttatcatcgaacggtaatgttaccgaatcgggttgcaaagaatgcgaagagttagaggaaaagaacattaaagaatttttgcaatccttcgttcacattgtgcagatgttcattaatacatcg

SEQ ID NO: 1278 - DNA, 678 bp, Artificial Sequence
  Description of Artificial Sequence: Synthetic polynucleotide
atgaaatatcttcttccaacggctgctgctggtttattgcttcttgccgcccagcctgcgatggctatgatcacttgtccgccccccatgtctgtggaacacgcggatatttgggtaaagagctactcactgtacagccgtgaacgttatatttgtaactccggcttcaaacgcaaagcaggaacttcatcactgacggagtgtgttttaaataaagctactaacgtcgcgcactggactactccctcattgaagtgcatccgtgatcctgctctgggtggcgggggtagcggcgggggtggaagcgggggtggagggtctggaggaggtgggtctaactgggtgaatgttatctcagatttaaagaaaattgaagacctgatccaatctatgcacatcgacgctactctgtatacagaatcagatgtacatccttcgtgtaaagtgaccgcgatgaagtgttttttgcttgagctgcaagtaatttcccttgagtccggggacgcttcaatccatgacacggtcgagaacctgatcattctggcaaacaatagtttatcatcgaacggtaatgttaccgaatcgggttgcaaagaatgcgaagagttagaggaaaagaacattaaagaatttttgcaatccttcgttcacattgtgcagatgttcattaatacatcg

SEQ ID NO: 1279 - DNA, 612 bp, Artificial Sequence
  Description of Artificial Sequence: Synthetic polynucleotide
atgatcacttgtccgccccccatgtctgtggaacacgcggatatttgggtaaagagctactcactgtacagccgtgaacgttatatttgtaactccggcttcaaacgcaaagcaggaacttcatcactgacggagtgtgttttaaataaagctactaacgtcgcgcactggactactccctcattgaagtgcatccgtgatcctgctctgggtggcgggggtagcggcgggggtggaagcgggggtggagggtctggaggaggtgggtctaactgggtgaatgttatctcagatttaaagaaaattgaagacctgatccaatctatgcacatcgacgctactctgtatacagaatcagatgtacatccttcgtgtaaagtgaccgcgatgaagtgttttttgcttgagctgcaagtaatttcccttgagtccggggacgcttcaatccatgacacggtcgagaacctgatcattctggcaaacaatagtttatcatcgaacggtaatgttaccgaatcgggttgcaaagaatgcgaagagttagaggaaaagaacattaaagaatttttgcaatccttcgttcacattgtgcagatgttcattaatacatcg

SEQ ID NO: 1280 - protein, 20 aa, Artificial Sequence
  Description of Artificial Sequence: Synthetic peptide
GGGGSGGGGSGGGGSGGGGS

SEQ ID NO: 1281 - protein, 70 aa, Homo sapiens
MITCPPPMSVEHADIWVKSYSLYSRERYICNSGFKRKAGTSSLTECVLNKATNVAHWTTPSLKCIRDPAL

SEQ ID NO: 1282 - protein, 237 aa, Artificial Sequence
  Description of Artificial Sequence: Synthetic polypeptide
MGYKMNISSLRKAFIFMGAVAALSLVNAQSALAMITCPPPMSVEHADIWVKSYSLYSRERYICNSGFKRKAGTSSLTECVLNKATNVAHWTTPSLKCIRDPALGGGGSGGGGSGGGGSGGGGSNWVNVISDLKKIEDLIQSMHIDATLYTESDVHPSCKVTAMKCFLLELQVISLESGDASIHDTVENLIILANNSLSSNGNVTESGCKECEELEEKNIKEFLQSFVHIVQMFINTS

SEQ ID NO: 1283 - protein, 222 aa, Artificial Sequence
  Description of Artificial Sequence: Synthetic polypeptide
MRVLLFLLLSLFMLPAFSMITCPPPMSVEHADIWVKSYSLYSRERYICNSGFKRKAGTSSLTECVLNKATNVAHWTTPSLKCIRDPALGGGGSGGGGSGGGGSGGGGSNWVNVISDLKKIEDLIQSMHIDATLYTESDVHPSCKVTAMKCFLLELQVISLESGDASIHDTVENLIILANNSLSSNGNVTESGCKECEELEEKNIKEFLQSFVHIVQMFINTS

SEQ ID NO: 1284 - protein, 226 aa, Artificial Sequence
  Description of Artificial Sequence: Synthetic polypeptide
MKYLLPTAAAGLLLLAAQPAMAMITCPPPMSVEHADIWVKSYSLYSRERYICNSGFKRKAGTSSLTECVLNKATNVAHWTTPSLKCIRDPALGGGGSGGGGSGGGGSGGGGSNWVNVISDLKKIEDLIQSMHIDATLYTESDVHPSCKVTAMKCFLLELQVISLESGDASIHDTVENLIILANNSLSSNGNVTESGCKECEELEEKNIKEFLQSFVHIVQMFINTS

SEQ ID NO: 1285 - protein, 204 aa, Artificial Sequence
  Description of Artificial Sequence: Synthetic polypeptide
MITCPPPMSVEHADIWVKSYSLYSRERYICNSGFKRKAGTSSLTECVLNKATNVAHWTTPSLKCIRDPALGGGGSGGGGSGGGGSGGGGSNWVNVISDLKKIEDLIQSMHIDATLYTESDVHPSCKVTAMKCFLLELQVISLESGDASIHDTVENLIILANNSLSSNGNVTESGCKECEELEEKNIKEFLQSFVHIVQMFINTS

SEQ ID NO: 1286 - DNA, 285 bp, Artificial Sequence
  Description of Artificial Sequence: Synthetic polynucleotide
atgaagcaaagtacgatcgcccttgcgctgttgccccttcttttcacgcccgtcaccaaggcagtgcccctgagccgcaccgtgcgttgtacgtgtatctccatctcaaaccagccggtaaacccgcgtagtttagaaaaactggagattatcccagccagccagttttgcccgcgcgttgagattattgcgaccatgaagaaaaaaggggaaaaacgttgccttaatccagaaagtaaggctatcaaaaacctgttgaaagctgtctcgaaagagcgttcctaa

SEQ ID NO: 1287 - DNA, 20 bp, Artificial Sequence
  Description of Artificial Sequence: Synthetic oligonucleotide
tatatatatatatatatata

SEQ ID NO: 1288 - DNA, 18 bp, Artificial Sequence
  Description of Artificial Sequence: Synthetic oligonucleotide
tatatatatatatatata

SEQ ID NO: 1289 - DNA, 10 bp, Artificial Sequence
  Description of Artificial Sequence: Synthetic oligonucleotide
cccccccccc

SEQ ID NO: 1290 - DNA, 12 bp, Artificial Sequence
  Description of Artificial Sequence: Synthetic oligonucleotide
cccccccccccc

SEQ ID NO: 1291 - DNA, 222 bp, Homo sapiens; identical to SEQ ID NO: 1148

SEQ ID NO: 1292 - DNA, 501 bp, Artificial Sequence
  Description of Artificial Sequence: Synthetic polynucleotide
atgggatataagatgaacatttcgtcactgcgtaaggcgttcatttttatgggcgcggttgccgcgttatcattagtgaatgcgcagagcgcattggctgctcccacatccagttcaacaaagaaaacacagcttcagcttgagcatttacttcttgatttgcagatgattcttaatggtattaacaactataaaaatccaaaacttacgcgcatgttgacgttcaaattttatatgccgaaaaaagctactgaattgaaacatttgcaatgtctggaagaggaattgaaaccacttgaggaggtccttaatttagcacagagcaagaacttccatttacgcccgcgcgatttaatttctaatattaatgttatcgtgttagagcttaaggggtctgaaactacgttcatgtgcgaatatgccgatgaaacggctactatcgtcgagttcttgaatcgctggattacgttctgtcagagcattatctcgaccctgacctaa

SEQ ID NO: 1293 - protein, 166 aa, Artificial Sequence
  Description of Artificial Sequence: Synthetic polypeptide
MGYKMNISSLRKAFIFMGAVAALSLVNAQSALAAPTSSSTKKTQLQLEHLLLDLQMILNGINNYKNPKLTRMLTFKFYMPKKATELKHLQCLEEELKPLEEVLNLAQSKNFHLRPRDLISNINVIVLELKGSETTFMCEYADETATIVEFLNRWITFCQSIISTLT
